(19) United States
(12) Patent Application Publication
(10) Pub. No.: US 2022/0396813 A1
(43) Pub. Date: Dec. 15, 2022

(54) RECOMBINASE COMPOSITIONS AND METHODS OF USE

(71) Applicant: Flagship Pioneering Innovations VI, LLC, Cambridge, MA (US)

(72) Inventors: Jacob Feala, Franklin, MA (US); Yanfang Fu, Arlington, MA (US); Jacob Rosenblum Rubens, Cambridge, MA (US); Robert James Citorik, Somerville, MA (US); Michael Travis Mee, Montreal (CA); Molly Krisann Gibson, Medford, MA (US)

(21) Appl. No.: 17/577,942

(22) Filed: Jan. 18, 2022

Related U.S. Application Data
(63) Continuation of application No. PCT/US2020/042511, filed on Jul. 17, 2020.
(60) Provisional application No. 63/039,328, filed on Jun. 15, 2020.
(60) Provisional application No. 62/876,165, filed on Jul. 19, 2019.

(51) Int. Cl. C12N 15/90; C12N 15/86

(52) U.S. Cl. CPC C12N 15/907; C12N 15/86; C12N 2750/14143; C12N 2800/40

(57) ABSTRACT

Methods and compositions for modulating a target genome are disclosed.

### RELATED APPLICATIONS

[0001] This application is a continuation of International Application PCT/US2020/042511, filed Jul. 17, 2020, which claims priority to U.S. Ser. No. 62/876,165 filed Jul. 19, 2019 and U.S. Ser. No. 63/039,328 filed Jun. 15, 2020, the entire contents of each of which is incorporated herein by reference.

### SEQUENCE LISTING

[0002] The instant application contains a Sequence Listing which has been submitted electronically in ASCII format and is hereby incorporated by reference in its entirety. Said ASCII copy, created on Jul. 16, 2020, is named V2065-7003WO_SL.txt and is 2,102,102 bytes in size.

### BACKGROUND

[0003] Integration of a nucleic acid of interest into a genome occurs at low frequency and with little site specificity, in the absence of a specialized protein to promote the insertion event. Some existing approaches, like CRISPR/Cas9, are more suited for small edits and are less effective at integrating longer sequences. Other existing approaches, like Cre/loxP, require a first step of inserting a loxP site into the genome and then a second step of inserting a sequence of interest into the loxP site. There is a need in the art for improved compositions (e.g., proteins and nucleic acids) and methods for inserting, altering, or deleting sequences of interest in a genome.

### SUMMARY OF THE INVENTION

[0004] This disclosure relates to novel compositions, systems and methods for altering a genome at one or more locations in a host cell, tissue or subject, in vivo or in vitro. In particular, the invention features compositions, systems and methods for the introduction of exogenous genetic elements into a host genome using a recombinase polypeptide (e.g., a tyrosine recombinase, e.g., as described herein).

### ENUMERATED EMBODIMENTS

[0005] 1. A system for modifying DNA comprising:

[0006] a) a recombinase polypeptide comprising an amino acid sequence of Table 1 or 2, or an amino acid sequence having at least 70%, 75%, 80%, 85%, 90%, 95%, 96%, 97%, 98%, or 99% identity thereto, or a nucleic acid encoding the recombinase polypeptide; and

[0007] b) a double-stranded insert DNA comprising:
[0008] (i) a DNA recognition sequence that binds to the recombinase polypeptide of (a),
   [0009] said DNA recognition sequence having a first parapalindromic sequence and a second parapalindromic sequence, wherein each parapalindromic sequence is about 10-30, 12-27, or 10-15 nucleotides, e.g., about 13 nucleotides, and the first and second parapalindromic sequences together comprise the parapalindromic region of a nucleotide sequence of Table 1, or a nucleotide sequence having at least 70%, 75%, 80%, 85%, 90%, 95%, 96%, 97%, 98%, or 99% identity thereto, or having no more than 1, 2, 3, or 4 sequence alterations (e.g., substitutions, insertions, or deletions) relative thereto, and
   [0010] said DNA recognition sequence further comprises a core sequence of about 5-10 nucleotides, e.g., about 8 nucleotides, wherein the core sequence is situated between the first and second parapalindromic sequences, and
[0011] (ii) a heterologous object sequence.
   2. A system for modifying DNA comprising:

[0012] a) a recombinase polypeptide comprising an amino acid sequence of Table 1 or 2, or an amino acid sequence having at least 70%, 75%, 80%, 85%, 90%, 95%, 96%, 97%, 98%, or 99% identity thereto, or a nucleic acid encoding the recombinase polypeptide; and

[0013] b) an insert DNA comprising:
[0014] (i) a human first parapalindromic sequence and a human second parapalindromic sequence of Table 1 that bind to the recombinase polypeptide of (a), and
[0015] (ii) optionally, a heterologous object sequence.
   3. The system of embodiment 1 or 2, wherein the recombinase polypeptide comprises an amino acid sequence having at least 70% sequence identity to an amino acid sequence of Table 2.
   4. The system of embodiment 1 or 2, wherein the recombinase polypeptide comprises an amino acid sequence having at least 75% sequence identity to an amino acid sequence of Table 2.
   5. The system of embodiment 1 or 2, wherein the recombinase polypeptide comprises an amino acid sequence having at least 80% sequence identity to an amino acid sequence of Table 2.
   6. The system of embodiment 1 or 2, wherein the recombinase polypeptide comprises an amino acid sequence having at least 85% sequence identity to an amino acid sequence of Table 2.
   7. The system of embodiment 1 or 2, wherein the recombinase polypeptide comprises an amino acid sequence having at least 90% sequence identity to an amino acid sequence of Table 2.
   8. The system of embodiment 1 or 2, wherein the recombinase polypeptide comprises an amino acid sequence having at least 95% sequence identity to an amino acid sequence of Table 2.
   9. The system of embodiment 1 or 2, wherein the recombinase polypeptide comprises an amino acid sequence having at least 96% sequence identity to an amino acid sequence of Table 2.
   10. The system of embodiment 1 or 2, wherein the recombinase polypeptide comprises an amino acid sequence having at least 97% sequence identity to an amino acid sequence of Table 2.
   11. The system of embodiment 1 or 2, wherein the recombinase polypeptide comprises an amino acid sequence having at least 98% sequence identity to an amino acid sequence of Table 2.
   12. The system of embodiment 1 or 2, wherein the recombinase polypeptide comprises an amino acid sequence having at least 99% sequence identity to an amino acid sequence of Table 2.
   13. The system of embodiment 1 or 2, wherein the recombinase polypeptide comprises an amino acid sequence having 100% sequence identity to an amino acid sequence of Table 2.
   14. The system of any of embodiments 1-13, wherein (a) and (b) are in separate containers.
   15. The system of any of embodiments 1-13, wherein (a) and (b) are admixed.
   16. A cell (e.g., a eukaryotic cell, e.g., a mammalian cell, e.g., human cell; or a prokaryotic cell) comprising: a recombinase polypeptide comprising an amino acid sequence of Table 1 or 2, or an amino acid sequence having at least 70%, 75%, 80%, 85%, 90%, 95%, 96%, 97%, 98%, or 99% identity thereto, or a nucleic acid encoding the recombinase polypeptide.
   17. The cell of embodiment 16, which further comprises an insert DNA comprising:

[0016] (i) a DNA recognition sequence that binds to the recombinase polypeptide, said DNA recognition sequence comprising a first parapalindromic sequence and a second parapalindromic sequence,

[0017] wherein each parapalindromic sequence is about 10-30, 12-27, or 10-15 nucleotides, e.g., about 13 nucleotides, and the first and second parapalindromic sequences together comprise the parapalindromic region of a nucleotide sequence of Table 1, or a nucleotide sequence having at least 70%, 75%, 80%, 85%, 90%, 95%, 96%, 97%, 98%, or 99% identity thereto, or having no more than 1, 2, 3, or 4 sequence alterations (e.g., substitutions, insertions, or deletions) relative thereto,

[0018] wherein said DNA recognition sequence further comprises a core sequence of about 5-10 nucleotides, e.g., about 8 nucleotides, and wherein the core sequence is situated between the first and second parapalindromic sequences; and

[0019] (ii) optionally, a heterologous object sequence.

18. A cell (e.g., eukaryotic cell, e.g., mammalian cell, e.g., human cell; or a prokaryotic cell) comprising:

[0020] (i) a DNA recognition sequence, said DNA recognition sequence comprising a first parapalindromic sequence and a second parapalindromic sequence,

[0021] wherein each parapalindromic sequence is about 10-30, 12-27, or 10-15 nucleotides, e.g., about 13 nucleotides, and the first and second parapalindromic sequences together comprise the parapalindromic region of a nucleotide sequence of Table 1, or a nucleotide sequence having at least 70%, 75%, 80%, 85%, 90%, 95%, 96%, 97%, 98%, or 99% identity thereto, or having no more than 1, 2, 3, or 4 sequence alterations (e.g., substitutions, insertions, or deletions) relative thereto,

[0022] wherein said DNA recognition sequence further comprises a core sequence of about 5-10 nucleotides, e.g., about 8 nucleotides, and wherein the core sequence is situated between the first and second parapalindromic sequences; and

[0023] (ii) a heterologous object sequence.

19. The cell of embodiment 18, wherein the DNA recognition sequence is within 1, 2, 3, 4, 5, 6, 7, 8, 9, 10, 15, 20, 25, 30, 40, 50, 60, 70, 80, 90, or 100 nucleotides of the heterologous object sequence.
20. The cell of embodiment 18 or 19, wherein the DNA recognition sequence and heterologous object sequence are in a chromosome or are extrachromosomal.
21. The cell of any of embodiments 16-20, wherein the cell is a eukaryotic cell.
22. The cell of embodiment 21, wherein the cell is a mammalian cell.
23. The cell of embodiment 22, wherein the cell is a human cell.
24. The cell of any of embodiments 16-20, wherein the cell is a prokaryotic cell (e.g., a bacterial cell).
25. An isolated eukaryotic cell comprising a heterologous object sequence stably integrated into its genome at a genomic location listed in column 2 or 3 of Table 1.
26. The isolated eukaryotic cell of embodiment 25, wherein the cell is an animal cell (e.g., a mammalian cell) or a plant cell.
27. The isolated eukaryotic cell of embodiment 26, wherein the mammalian cell is a human cell.
28. The isolated eukaryotic cell of embodiment 26, wherein the animal cell is a bovine cell, horse cell, pig cell, goat cell, sheep cell, chicken cell, or turkey cell.
29. The isolated eukaryotic cell of embodiment 26, wherein the plant cell is a corn cell, soy cell, wheat cell, or rice cell.
30. A method of modifying the genome of a eukaryotic cell (e.g., mammalian cell, e.g., human cell) comprising contacting the cell with:

[0024] a) a recombinase polypeptide comprising an amino acid sequence of Table 1 or 2, or a sequence having at least 70%, 75%, 80%, 85%, 90%, 95%, 96%, 97%, 98%, or 99% identity thereto, or a nucleic acid encoding the recombinase polypeptide; and

[0025] b) an insert DNA comprising:
[0026] (i) a DNA recognition sequence that binds to the recombinase polypeptide of (a), said DNA recognition sequence comprising a first parapalindromic sequence and a second parapalindromic sequence, wherein each parapalindromic sequence is about 10-30, 12-27, or 10-15 nucleotides, e.g., about 13 nucleotides, and the first and second parapalindromic sequences together comprise the parapalindromic region of a nucleotide sequence of Table 1, or a nucleotide sequence having at least 70%, 75%, 80%, 85%, 90%, 95%, 96%, 97%, 98%, or 99% identity thereto, or having no more than 1, 2, 3, or 4 sequence alterations (e.g., substitutions, insertions, or deletions) relative thereto,
[0027] wherein said DNA recognition sequence further comprises a core sequence of about 5-10 nucleotides, e.g., about 8 nucleotides, and wherein the core sequence is situated between the first and second parapalindromic sequences, and
[0028] (ii) a heterologous object sequence, thereby modifying the genome of the eukaryotic cell.
   31. A method of inserting a heterologous object sequence into the genome of a eukaryotic cell (e.g., mammalian cell, e.g., human cell) comprising contacting the cell with:

[0029] a) a recombinase polypeptide comprising an amino acid sequence of Table 1 or 2, or a sequence having at least 70%, 75%, 80%, 85%, 90%, 95%, 96%, 97%, 98%, or 99% identity thereto, or a nucleic acid encoding the polypeptide; and

[0030] b) an insert DNA comprising:
[0031] (i) a DNA recognition sequence that binds to the recombinase polypeptide of (a), said DNA recognition sequence comprising a first parapalindromic sequence and a second parapalindromic sequence, wherein each parapalindromic sequence is about 10-30, 12-27, or 10-15 nucleotides, e.g., about 13 nucleotides, and the first and second parapalindromic sequences together comprise the parapalindromic region of a nucleotide sequence of Table 1 or 2, and
[0032] wherein said DNA recognition sequence further comprises a core sequence of about 5-10 nucleotides, e.g., about 8 nucleotides, and wherein the core sequence is situated between the first and second parapalindromic sequences, and
[0033] (ii) a heterologous object sequence,
[0034] thereby inserting the heterologous object sequence into the genome of the eukaryotic cell, e.g., at a frequency of at least about 0.1% (e.g., at least about 0.1%, 0.5%, 1%, 5%, 10%, 20%, 30%, 40%, 50%, 60%, 70%, 80%, 85%, 90%, 95%, 96%, 97%, 98%, 99%, or 100% of a population of the eukaryotic cell, e.g., as measured in an assay of Example 5.
   32. The method of embodiment 30 or 31, wherein (a) and (b) are administered separately or together.
   33. The method of embodiment 30 or 31, wherein (a) is administered prior to, concurrently with, or after administration of (b).
   34. The method of any of embodiments 30-33, wherein (a) comprises the nucleic acid encoding the polypeptide.
   35. The method of embodiment 34, wherein the nucleic acid of (a) and the insert DNA of (b) are situated on the same nucleic acid molecule, e.g., are situated on the same vector.
   36. The method of embodiment 34, wherein the nucleic acid of (a) and the insert DNA of (b) are situated on separate nucleic acid molecules.
   37. The method of any of embodiments 30-36, wherein the cell has only one endogenous DNA recognition sequence that is compatible with the DNA recognition sequence of the insert DNA.
   38. The method of any of embodiments 30-36, wherein the cell has two or more endogenous DNA recognition sequences that are compatible with the DNA recognition sequence of the insert DNA.
   39. An isolated recombinase polypeptide comprising an amino acid sequence of Table 1 or 2, or a sequence having at least 70%, 75%, 80%, 85%, 90%, 95%, 96%, 97%, 98%, or 99% identity thereto.
   40. The isolated recombinase polypeptide of embodiment 39, which comprises at least one insertion, deletion, or substitution relative to a recombinase sequence of Table 1 or 2.
   41. The isolated recombinase polypeptide of embodiment 40, wherein the synthetic recombinase polypeptide binds a eukaryotic (e.g., mammalian, e.g., human) genomic locus (e.g., a sequence of Table 1).
   42. The isolated recombinase polypeptide of embodiment 40 or 41, wherein the synthetic recombinase polypeptide has at least a 2-, 3-, 4-, or 5-fold increase in affinity for the genomic locus, relative to the corresponding unmodified amino acid sequence of Table 1 or 2.
   43. An isolated nucleic acid encoding a recombinase polypeptide comprising an amino acid sequence of Table 1 or 2, or an amino acid sequence having at least 70%, 75%, 80%, 85%, 90%, 95%, 96%, 97%, 98%, or 99% identity thereto.
   44. The isolated nucleic acid of embodiment 43, which encodes a recombinase polypeptide comprising at least one insertion, deletion, or substitution relative to a recombinase sequence of Table 1 or 2.
   45. The isolated nucleic acid sequence of embodiment 43 or 44, which is codon-optimized for mammalian cells, e.g., human cells.
   46. The isolated nucleic acid of any of embodiments 43-45, which further comprises a heterologous promoter (e.g., a mammalian promoter, e.g., a tissue-specific promoter), microRNA (e.g., a tissue-specific restrictive miRNA), polyadenylation signal, or a heterologous payload.
   47. An isolated nucleic acid (e.g., DNA) comprising:

[0035] (i) a DNA recognition sequence, said DNA recognition sequence comprising a first parapalindromic sequence and a second parapalindromic sequence, wherein each parapalindromic sequence is about 10-30, 12-27, or 10-15 nucleotides, e.g., about 13 nucleotides, and the first and second parapalindromic sequences together comprise the parapalindromic region of a nucleotide sequence of Table 1, and

[0036] said DNA recognition sequence further comprises a core sequence of about 5-10 nucleotides, e.g., about 8 nucleotides, wherein the core sequence is situated between the first and second parapalindromic sequences, and

[0037] (ii) a heterologous object sequence.

48. The isolated nucleic acid of embodiment 47, which binds to a recombinase polypeptide of Table 1 or 2.
49. A method of making a recombinase polypeptide, the method comprising:

[0038] a) providing a nucleic acid encoding a recombinase polypeptide comprising an amino acid sequence of Table 1 or 2, or a sequence having at least 70%, 75%, 80%, 85%, 90%, 95%, 96%, 97%, 98%, or 99% identity thereto, and

[0039] b) introducing the nucleic acid into a cell (e.g., a eukaryotic cell or a prokaryotic cell, e.g., as described herein) under conditions that allow for production of the recombinase polypeptide,

[0040] thereby making the recombinase polypeptide.

50. A method of making a recombinase polypeptide, the method comprising:

[0041] a) providing a cell (e.g., a prokaryotic or eukaryotic cell) comprising a nucleic acid encoding a recombinase polypeptide comprising an amino acid sequence of Table 1 or 2, or a sequence having at least 70%, 75%, 80%, 85%, 90%, 95%, 96%, 97%, 98%, or 99% identity thereto, and

[0042] b) incubating the cell under conditions that allow for production of the recombinase polypeptide,

[0043] thereby making the recombinase polypeptide.

51. A method of making an insert DNA that comprises a DNA recognition sequence and a heterologous sequence, comprising:

[0044] a) providing a nucleic acid comprising:
[0045] (i) a DNA recognition sequence that binds to a recombinase polypeptide comprising an amino acid sequence of Table 1 or 2, or a sequence having at least 70%, 75%, 80%, 85%, 90%, 95%, 96%, 97%, 98%, or 99% identity thereto, said DNA recognition sequence comprising a first parapalindromic sequence and a second parapalindromic sequence, wherein each parapalindromic sequence is about 10-30, 12-27, or 10-15 nucleotides, e.g., about 13 nucleotides, and the first and second parapalindromic sequences together comprise the parapalindromic region of a nucleotide sequence of Table 1, and
[0046] said DNA recognition sequence further comprises a core sequence of about 5-10 nucleotides, e.g., about 8 nucleotides, wherein the core sequence is situated between the first and second parapalindromic sequences, and
[0047] (ii) a heterologous object sequence, and

[0048] b) introducing the nucleic acid into a cell (e.g., a eukaryotic cell or a prokaryotic cell, e.g., as described herein) under conditions that allow for replication of the nucleic acid,

[0049] thereby making the insert DNA.

52. The system, cell, method, isolated recombinase polypeptide, or isolated nucleic acid of any of the preceding embodiments, wherein the recombinase polypeptide comprises at least one insertion, deletion, or substitution relative to the amino acid sequence of Table 1 or 2.
53. The system, cell, method, isolated recombinase polypeptide, or isolated nucleic acid of any of the preceding embodiments, wherein the recombinase polypeptide comprises a truncation at the N-terminus, C-terminus, or both of the N- and C-termini relative to the amino acid sequence of Table 1 or 2.
54. The system, cell, method, isolated recombinase polypeptide, or isolated nucleic acid of any of the preceding embodiments, wherein the recombinase polypeptide comprises a nuclear localization sequence, e.g., an endogenous nuclear localization sequence or a heterologous nuclear localization sequence.
55. The system, cell, method, isolated recombinase polypeptide, or isolated nucleic acid of any of the preceding embodiments, wherein the heterologous object sequence is inserted into the genome of the cell at an efficiency of at least about 0.1% (e.g., at least about 0.1%, 0.5%, 1%, 5%, 10%, 20%, 30%, 40%, 50%, 60%, 70%, 80%, 85%, 90%, 95%, 96%, 97%, 98%, 99%, or 100%) of a population of the cell, e.g., as measured in an assay of Example 5.
56. The system, cell, method, isolated recombinase polypeptide, or isolated nucleic acid of any of the preceding embodiments, wherein the heterologous object sequence is inserted into a site within the genome of the cell (e.g., a locus listed in column 4 of Table 1, e.g., corresponding to the row for a recombinase listed in column 1 of Table 1) in at least about 1%, (e.g., at least about 1%, 5%, 10%, 15%, 20%, 25%, 30%, 40%, 50%, 60%, 70%, 80%, 85%, 90%, 95%, 96%, 97%, 98%, 99%, 99.9%, or 100%) of insertion events, e.g., as measured by an assay of Example 4.
57. The system, cell, method, isolated recombinase polypeptide, or isolated nucleic acid of any of the preceding embodiments, wherein, in a population of the cells (e.g., contacted with the system), the heterologous object sequence is inserted into between 1-10, e.g., 1-9, 1-8, 1-7, 1-6, 1-5, 1-4, 1-3, 2-10, 2-5, 2-4, 3-10, 3-5, or 5-10 sites within the genome of the cell (e.g., a locus listed in column 4 of Table 1, e.g., corresponding to the row for a recombinase listed in column 1 of Table 1), in at least 1%, 5%, 10%, 15%, 20%, 25%, 30%, 40%, 50%, 60%, 70%, 80%, 85%, 90%, 95%, 96%, 97%, 98%, 99%, 99.9%, or 100%) of the cells in the population, e.g., as measured by an assay of Example 4.
58. The system, cell, method, isolated recombinase polypeptide, or isolated nucleic acid of any of the preceding embodiments, wherein, in a population of cells contacted with the system, the heterologous object sequence is inserted into exactly one site within the genome of the cell (e.g., a locus listed in column 4 of Table 1, e.g., corresponding to the row for a recombinase listed in column 1 of Table 1), in at least 1%, 5%, 10%, 15%, 20%, 25%, 30%, 40%, 50%, 60%, 70%, 80%, 85%, 90%, 95%, 96%, 97%, 98%, 99%, 99.9%, or 100%) of the cells in the population, e.g., as measured by an assay of Example 4.
59. The system, cell, method, isolated recombinase polypeptide, or isolated nucleic acid of any of the preceding embodiments, wherein the heterologous object sequence is inserted into between 1-10, e.g., 1-9, 1-8, 1-7, 1-6, 1-5, 1-4, 1-3, 2-10, 2-5, 2-4, 3-10, 3-5, or 5-10 sites within the genome of the cell (e.g., a locus listed in column 4 of Table 1, e.g., corresponding to the row for a recombinase listed in column 1 of Table 1), e.g., as measured by an assay of Example 4.
60. The system, cell, method, isolated recombinase polypeptide, or isolated nucleic acid of any of the preceding embodiments, wherein the recombinase polypeptide is bound to the insert DNA.
61. The system, cell, method, isolated recombinase polypeptide, or isolated nucleic acid of any of the preceding embodiments, wherein the recombinase polypeptide is provided by providing a nucleic acid encoding the recombinase polypeptide.
62. The system, cell, method, isolated recombinase polypeptide, or isolated nucleic acid of any of the preceding embodiments, which results in an insert frequency of the heterologous object sequence into the genome of at least about 0.1% (e.g., at least about 0.1%, 0.5%, 1%, 5%, 10%, 20%, 30%, 40%, 50%, 60%, 70%, 80%, 85%, 90%, 95%, 96%, 97%, 98%, 99%, or 100%) of a population of the cells, e.g., as measured in an assay of Example 5.
63. The system, cell, method, isolated recombinase polypeptide, or isolated nucleic acid of any of the preceding embodiments, wherein the first parapalindromic sequence comprises a sequence comprising the first 10-30, 12-27, or 10-15, e.g., 10, 11, 12, 13, 14, or 15 nucleotides of the nucleotide sequence of column 2 or column 3 of Table 1, or a sequence having no more than 1, 2, or 3 substitutions, insertions, or deletions relative thereto.
64. The system, cell, method, isolated recombinase polypeptide, or isolated nucleic acid of embodiment 63, wherein the second parapalindromic sequence further comprises a second sequence comprising the last 10-30, 12-27, or 10-15, e.g., 10, 11, 12, 13, 14, or 15 nucleotides of the same nucleotide sequence of column 2 or column 3 of Table 1, or a sequence having no more than 1, 2, or 3 substitutions, insertions, or deletions relative thereto.
65. The system, cell, method, isolated recombinase polypeptide, or isolated nucleic acid of any of the preceding embodiments, wherein the insert DNA further comprises a core sequence comprising the 8 nucleotides situated between the parapalindromic regions of column 3 of Table 1, or a sequence having no more than 1, 2, or 3 substitutions, insertions, or deletions relative thereto.
66. The system, cell, method, isolated recombinase polypeptide, or isolated nucleic acid of any of the preceding embodiments, wherein the first and second parapalindromic sequences comprise a perfectly palindromic sequence.
67. The system, cell, method, isolated recombinase polypeptide, or isolated nucleic acid of any of the preceding embodiments, wherein the parapalindromic sequence comprises 1, 2, 3, 4, 5, or 6 non-palindromic positions.
68. The system, cell, method, isolated recombinase polypeptide, or isolated nucleic acid of any of the preceding embodiments, wherein the parapalindromic region comprises a 5′ region of 10-30, 12-27, or 10-15, e.g., about 13 nucleotides and/or a 3′ region of 10-30, 12-27, or 10-15, e.g., about 13 nucleotides.
69. The system, cell, method, isolated recombinase polypeptide, or isolated nucleic acid of any of the preceding embodiments, wherein the first and second parapalindromic sequences are the same length.
70. The system, cell, method, isolated recombinase polypeptide, or isolated nucleic acid of any of the preceding embodiments, wherein the core sequence is 5-10 nucleotides (e.g., about 8 nucleotides) in length.
71. The system, cell, method, isolated recombinase polypeptide, or isolated nucleic acid of any of the preceding embodiments, wherein the core sequence is capable of hybridizing to a corresponding sequence in the human genome, or the reverse complement thereof.
72. The system, cell, method, isolated recombinase polypeptide, or isolated nucleic acid of any of the preceding embodiments, wherein the core sequence has at least 10%, 20%, 30%, 40%, 50%, 60%, 70%, 80%, or 90% identity to a corresponding sequence in the human genome.
73. The system, cell, method, isolated recombinase polypeptide, or isolated nucleic acid of any of the preceding embodiments, wherein the core sequence has no more than 1, 2, 3, 4, 5, 6, 7, 8, or 9 mismatches to a corresponding sequence in the human genome.
74. The system, cell, method, isolated recombinase polypeptide, or isolated nucleic acid of any of the preceding embodiments, wherein the core sequence, when cleaved by the recombinase, forms a sticky end that is capable of hybridizing to a corresponding sequence in the human genome.
75. The system, cell, method, isolated recombinase polypeptide, or isolated nucleic acid of any of the preceding embodiments, wherein the heterologous object sequence comprises a eukaryotic gene, e.g., a mammalian gene, e.g., human gene, e.g., a blood factor (e.g., genome factor I, II, V, VII, X, XI, XII or XIII) or enzyme, e.g., lysosomal enzyme, or synthetic human gene (e.g. a chimeric antigen receptor).
76. The system, cell, method, isolated recombinase polypeptide, or isolated nucleic acid of any of the preceding embodiments, wherein the insert DNA comprises a heterologous object sequence and a DNA recognition sequence.
77. The system, cell, method, isolated recombinase polypeptide, or isolated nucleic acid of any of the preceding embodiments, wherein the insert DNA comprises a nucleic acid sequence encoding the recombinase polypeptide.
78. The system, cell, method, isolated recombinase polypeptide, or isolated nucleic acid of any of the preceding embodiments, wherein the insert DNA and a nucleic acid encoding the recombinase polypeptide are present in separate nucleic acid molecules.
79. The system, cell, method, isolated recombinase polypeptide, or isolated nucleic acid of any of embodiments 1-77, wherein the insert DNA and a nucleic acid encoding the recombinase polypeptide are present in the same nucleic acid molecule.
80. The system, cell, method, isolated recombinase polypeptide, or isolated nucleic acid of any of the preceding embodiments, wherein the insert DNA further comprises 1, 2, 3, 4, 5, or all of:
[0050] (a) an open reading frame, e.g., a sequence encoding a polypeptide, e.g., an enzyme (e.g., a lysosomal enzyme), a blood factor, an exon.
[0051] (b) a non-coding and/or regulatory sequence, e.g., a sequence that binds a transcriptional modulator, e.g., a promoter (e.g., a heterologous promoter), an enhancer, an insulator.
[0052] (c) a splice acceptor site;
[0053] (d) a polyA site;
[0054] (e) an epigenetic modification site; or
[0055] (f) a gene expression unit.
   81. The system, cell, method, isolated recombinase polypeptide, or isolated nucleic acid of any of the preceding embodiments, wherein the insert DNA comprises a plasmid, viral vector (e.g., lentiviral vector or episomal viral vector), or other self-replicating vector.
   82. The system, cell, method, isolated recombinase polypeptide, or isolated nucleic acid of any of the preceding embodiments, wherein the cell does not comprise an endogenous human gene comprised by the heterologous object sequence, or does not comprise a protein encoded by said gene.
   83. The system, cell, method, isolated recombinase polypeptide, or isolated nucleic acid of any of the preceding embodiments, wherein the cell is from an organism that does not comprise an endogenous human gene comprised by the heterologous object sequence, or does not comprise a protein encoded by said gene.
   84. The system, cell, method, isolated recombinase polypeptide, or isolated nucleic acid of any of the preceding embodiments, wherein the cell comprises an endogenous human DNA recognition sequence.
   85. The system, cell, method, isolated recombinase polypeptide, or isolated nucleic acid of embodiment 84, wherein the endogenous human DNA recognition sequence is operably linked to, e.g., is situated in a site within the human genome having at least 1, 2, 3, 4, 5, 6, 7, 8 or 9 of the following criteria:
   (i) is located >300 kb from a cancer-related gene;
   (ii) is >300 kb from a miRNA/other functional small RNA;
   (iii) is >50 kb from a 5′ gene end;
   (iv) is >50 kb from a replication origin;
   (v) is >50 kb away from any ultraconserved element;
   (vi) has low transcriptional activity (i.e. no mRNA+/−25 kb); (vii) is not in copy number variable region;
   (viii) is in open chromatin; and/or
   (ix) is unique, e.g., with 1 copy in the human genome.
   86. The system, cell, method, isolated recombinase polypeptide, or isolated nucleic acid of any of the preceding embodiments, wherein the cell is an animal cell, e.g., a mammalian cell, e.g., a human cell.
   87. The system, cell, method, isolated recombinase polypeptide, or isolated nucleic acid of any of the preceding embodiments, wherein the cell is a plant cell.
   88. The system, cell, method, isolated recombinase polypeptide, or isolated nucleic acid of any of the preceding embodiments, wherein the cell is not genetically modified.
   89. The system, cell, method, isolated recombinase polypeptide, or isolated nucleic acid of any of the preceding embodiments, wherein the cell does not comprise a loxP site.
   90. The system or method of any of the preceding embodiments, wherein the nucleic acid encoding the recombinase polypeptide is in a viral vector, e.g., an AAV vector.
   91. The system or method of any of the preceding embodiments, wherein the double-stranded insert DNA is in a viral vector, e.g., an AAV vector.
   92. The system or method of any of the preceding embodiments, wherein the nucleic acid encoding the recombinase polypeptide is an mRNA, wherein optionally the mRNA is in an LNP.
   93. The system or method of any of the preceding embodiments, wherein the double-stranded insert DNA is not in a viral vector, e.g., wherein the double-stranded insert DNA is naked DNA or DNA in a transfection reagent.
   94. The system or method of any of the preceding embodiments, wherein:

[0056] the nucleic acid encoding the recombinase polypeptide is in a first viral vector, e.g., a first AAV vector, and

[0057] the insert DNA is in a second viral vector, e.g., a second AAV vector.

95. The system or method of any of the preceding embodiments, wherein:

[0058] the nucleic acid encoding the recombinase polypeptide is an mRNA, wherein optionally the mRNA is in an LNP, and

[0059] the insert DNA is in a viral vector, e.g., an AAV vector.

96. The system or method of any of the preceding embodiments, wherein:

[0060] the nucleic acid encoding the recombinase polypeptide is an mRNA, and

[0061] the double-stranded insert DNA is not in a viral vector, e.g., wherein the double-stranded insert DNA is naked DNA or DNA in a transfection reagent.

97. The system or method of any of the preceding embodiments, wherein the insert DNA has a length of at least 1 kb, 2 kb, 3 kb, 4 kb, 5 kb, 6 kb, 7 kb, 8 kb, 9 kb, 10 kb, 20 kb, 30 kb, 40 kb, 50 kb, 60 kb, 70 kb, 80 kb, 90 kb, 100 kb, 110 kb, 120 kb, 130 kb, 140 kb, or 150 kb.
98. The system or method of any of the preceding embodiments, wherein the insert DNA does not comprise an antibiotic resistance gene or any other bacterial genes or parts.
99. The system, cell, polypeptide, nucleic acid, or method of any of the preceding embodiments, wherein the recombinase polypeptide is a recombinase selected from Rec17 (SEQ ID NO: 1231), Rec19 (SEQ ID NO: 1233), Rec20 (SEQ ID NO: 1234), Rec27 (SEQ ID NO: 1241), Rec29 (SEQ ID NO: 1243), Rec30 (SEQ ID NO: 1244), Rec31 (SEQ ID NO: 1245), Rec32 (SEQ ID NO: 1246), Rec33 (SEQ ID NO: 1247), Rec34 (SEQ ID NO: 1248), Rec35 (SEQ ID NO: 1249), Rec36 (SEQ ID NO: 1250), Rec37 (SEQ ID NO: 1251), Rec38 (SEQ ID NO: 1252), Rec39 (SEQ ID NO: 1253), Rec338 (SEQ ID NO: 1552), or Rec589 (SEQ ID NO: 1803), or a recombinase polypeptide having an amino acid sequence having at least 70%, 75%, 80%, 85%, 90%, 95%, 96%, 97%, 98%, or 99% identity thereto, or having no more than 1, 2, 3, 4, 5, 6, 7, 8, 9, 10, 15, 20, 25, 30, 35, 40, 45, or 50 sequence alterations (e.g., substitutions, insertions, or deletions) relative thereto.
100. The system, cell, polypeptide, nucleic acid, or method of any of the preceding embodiments, wherein when the polypeptide, system, or nucleic acid is used in a reporter gene inversion assay, e.g., an assay of Example 13, it results in reporter gene expression in at least 1, 2, 3, 4, 5, 6, 7, 8, 9, 10, 11, 12, 13, 14, 15, 20, 25, 30, 35, 40, 45, 50, 55, or 60% of cells.
101. The system, cell, polypeptide, nucleic acid, or method of any of the preceding embodiments, wherein the reporter gene inversion assay comprises:

[0062] i) introducing the polypeptide, system, or nucleic acid into a test population of cells,

[0063] ii) introducing into the test population of cells a nucleic acid comprising from 5′ to 3′ a promoter, a first DNA recognition sequence that binds the recombinase polypeptide, a GFP gene in antisense orientation, and a second DNA recognition sequence that binds the recombinase polypeptide (e.g., wherein the first and second DNA recognition sequences each comprise one or more sequences from column 3 of Table 1 from the same row as the corresponding recombinase polypeptide),

[0064] iii) incubating the test population of cells for a time sufficient to allow for inversion of the GFP gene, e.g., for 2 days at 37° C., e.g., as described in Example 13, and

[0065] iv) determining a value for the percentage of cells in the test population that display GFP fluorescence, e.g., wherein the threshold for GFP fluorescence is at least 1.7× (1.7 times), 1.8×, 1.9×, 2×, 2.1×, 2.2×, or 2.3× (e.g., 2×) the background fluorescence, e.g., as described in Example 13.

102. The system, cell, polypeptide, nucleic acid, or method of any of the preceding embodiments, wherein when the polypeptide, system, or nucleic acid is used in a reporter gene integration assay, e.g., an assay of Example 14, it results in an average reporter gene copy number of at least 0.05, 0.1, 0.15, 0.2, 0.25, 0.3, 0.35, 0.4, 0.45, 0.5, 0.55, 0.6, 0.7, 0.8, 0.9, or 0.95 per cell.
103. The system, cell, polypeptide, nucleic acid, or method of any of the preceding embodiments, wherein the reporter gene integration assay comprises:

[0066] i) introducing the polypeptide, system, or nucleic acid into a test population of cells,

[0067] ii) introducing into the test population of cells a nucleic acid comprising from 5′ to 3′ a first DNA recognition sequence that binds the recombinase polypeptide, a GFP gene, and a second DNA recognition sequence that binds the recombinase polypeptide (e.g., wherein the first and second DNA recognition sequences each comprise one or more sequences from column 3 of Table 1 from the same row as the corresponding recombinase polypeptide),

[0068] iii) incubating the test population of cells for a time sufficient to allow for integration of the GFP gene into the genomic DNA of the test population of cells, e.g., for 2-5 days at 37° C., e.g., as described in Example 14, and

[0069] iv) determining a value for the average copy number of GFP gene per cell in the genomic DNA of the test population of cells, e.g., wherein the threshold copy number is at least 1.7× (1.7 times), 1.8×, 1.9×, 2×, 2.1×, 2.2×, or 2.3× (e.g., 2×) the background copy number detected, e.g., as described in Example 14.

104. The system, cell, polypeptide, nucleic acid, or method of any of the preceding embodiments, wherein the nucleic acid (e.g., isolated nucleic acid), insert DNA (e.g., double-stranded insert DNA), or heterologous object sequence comprises an artificial chromosome, e.g., a bacterial artificial chromosome.
105. The system, cell, polypeptide, or nucleic acid of any of the preceding embodiments for use as a laboratory or research tool, or in a laboratory method or research method.
106. The method of any of embodiments 30-38 or 52-104, wherein the method is used as a laboratory or research method or as part of a laboratory or research method.
107. The system, cell, polypeptide, nucleic acid, or method of either of embodiments 105 or 106, wherein the laboratory or research tool or laboratory or research method is used to modify an animal cell, e.g., a mammalian cell (e.g., a human cell), a plant cell, or a fungal cell.
108. The system, cell, polypeptide, nucleic acid, or method of any of embodiments 105-107, wherein the laboratory or research tool or laboratory or research method is used in vitro.

[0070] The disclosure contemplates all combinations of any one or more of the foregoing aspects and/or embodiments, as well as combinations with any one or more of the embodiments set forth in the detailed description and examples.

### Definitions

[0071] Domain: The term “domain” as used herein refers to a structure of a biomolecule that contributes to a specified function of the biomolecule. A domain may comprise a contiguous region (e.g., a contiguous sequence) or distinct, non-contiguous regions (e.g., non-contiguous sequences) of a biomolecule. Examples of protein domains include, but are not limited to, a nuclear localization sequence, a recombinase domain, a DNA recognition domain (e.g., that binds to or is capable of binding to a recognition site, e.g. as described herein), a tyrosine recombinase N-terminal domain, and a tyrosine recombinase C-terminal domain; an example of a domain of a nucleic acid is a regulatory domain, such as a transcription factor binding domain, a parapalindromic sequence, a parapalindromic region, a core sequence, or an object sequence (e.g., a heterologous object sequence). In some embodiments, a recombinase polypeptide comprises one or more domains (e.g., a recombinase domain, or a DNA recognition domain) of a polypeptide of Table 1 or 2, or a fragment or variant thereof.

[0072] Exogenous: As used herein, the term exogenous, when used with reference to a biomolecule (such as a nucleic acid sequence or polypeptide) means that the biomolecule was introduced into a host genome, cell or organism by the hand of man. For example, a nucleic acid that is as added into an existing genome, cell, tissue or subject using recombinant DNA techniques or other methods is exogenous to the existing nucleic acid sequence, cell, tissue or subject.

[0073] Genomic safe harbor site (GSH site): A genomic safe harbor site is a site in a host genome that is able to accommodate the integration of new genetic material, e.g., such that the inserted genetic element does not cause significant alterations of the host genome posing a risk to the host cell or organism. A GSH site generally meets 1, 2, 3, 4, 5, 6, 7, 8 or 9 of the following criteria: (i) is located >300 kb from a cancer-related gene; (ii) is >300 kb from a miRNA/other functional small RNA; (iii) is >50 kb from a 5′ gene end; (iv) is >50 kb from a replication origin; (v) is >50 kb away from any ultraconserved element; (vi) has low transcriptional activity (i.e. no mRNA+/−25 kb); (vii) is not in a copy number variable region; (viii) is in open chromatin; and/or (ix) is unique, with 1 copy in the human genome. Examples of GSH sites in the human genome that meet some or all of these criteria include (i) the adeno-associated virus site 1 (AAVS1), a naturally occurring site of integration of AAV virus on chromosome 19; (ii) the chemokine (C-C motif) receptor 5 (CCR5) gene, a chemokine receptor gene known as an HIV-1 coreceptor; (iii) the human ortholog of the mouse Rosa26 locus; (iv) the rDNA locus. Additional GSH sites are known and described, e.g., in Pellenz et al. epub Aug. 20, 2018 (https://doi.org/10.1101/396390).

[0074] Heterologous: The term heterologous, when used to describe a first element in reference to a second element means that the first element and second element do not exist in nature disposed as described. For example, a heterologous polypeptide, nucleic acid molecule, construct or sequence refers to (a) a polypeptide, nucleic acid molecule or portion of a polypeptide or nucleic acid molecule sequence that is not native to a cell in which it is expressed, (b) a polypeptide or nucleic acid molecule or portion of a polypeptide or nucleic acid molecule that has been altered or mutated relative to its native state, or (c) a polypeptide or nucleic acid molecule with an altered expression as compared to the native expression levels under similar conditions. For example, a heterologous regulatory sequence (e.g., promoter, enhancer) may be used to regulate expression of a gene or a nucleic acid molecule in a way that is different than the gene or a nucleic acid molecule is normally expressed in nature. In certain embodiments, a heterologous nucleic acid molecule may exist in a native host cell genome, but may have an altered expression level or have a different sequence or both. In other embodiments, heterologous nucleic acid molecules may not be endogenous to a host cell or host genome but instead may have been introduced into a host cell by transformation (e.g., transfection, electroporation), wherein the added molecule may integrate into the host genome or can exist as extra-chromosomal genetic material either transiently (e.g., mRNA) or semi-stably for more than one generation (e.g., episomal viral vector, plasmid or other self-replicating vector).

[0075] Mutation or Mutated: The term “mutated” when applied to nucleic acid sequences means that nucleotides in a nucleic acid sequence may be inserted, deleted or changed compared to a reference (e.g., native) nucleic acid sequence. A single alteration may be made at a locus (a point mutation) or multiple nucleotides may be inserted, deleted or changed at a single locus. In addition, one or more alterations may be made at any number of loci within a nucleic acid sequence. A nucleic acid sequence may be mutated by any method known in the art.

[0076] Nucleic acid molecule: Nucleic acid molecule refers to both RNA and DNA molecules including, without limitation, cDNA, genomic DNA and mRNA, and also includes synthetic nucleic acid molecules, such as those that are chemically synthesized or recombinantly produced, such as DNA templates, as described herein. The nucleic acid molecule can be double-stranded or single-stranded, circular or linear. If single-stranded, the nucleic acid molecule can be the sense strand or the antisense strand. Unless otherwise indicated, and as an example for all sequences described herein under the general format “SEQ ID NO:,” “nucleic acid comprising SEQ ID NO:1” refers to a nucleic acid, at least a portion which has either (i) the sequence of SEQ ID NO:1, or (ii) a sequence complimentary to SEQ ID NO:1. The choice between the two is dictated by the context in which SEQ ID NO:1 is used. For instance, if the nucleic acid is used as a probe, the choice between the two is dictated by the requirement that the probe be complimentary to the desired target. Nucleic acid sequences of the present disclosure may be modified chemically or biochemically or may contain non-natural or derivatized nucleotide bases, as will be readily appreciated by those of skill in the art. Such modifications include, for example, labels, methylation, substitution of one or more naturally occurring nucleotides with an analog, inter-nucleotide modifications such as uncharged linkages (for example, methyl phosphonates, phosphotriesters, phosphoramidates, carbamates, etc.), charged linkages (for example, phosphorothioates, phosphorodithioates, etc.), pendant moieties, (for example, polypeptides), intercalators (for example, acridine, psoralen, etc.), chelators, alkylators, and modified linkages (for example, alpha anomeric nucleic acids, etc.). Also included are synthetic molecules that mimic polynucleotides in their ability to bind to a designated sequence via hydrogen bonding and other chemical interactions. Such molecules are known in the art and include, for example, those in which peptide linkages substitute for phosphate linkages in the backbone of a molecule. Other modifications can include, for example, analogs in which the ribose ring contains a bridging moiety or other structure such as modifications found in “locked” nucleic acids.

[0077] Gene expression unit: a gene expression unit is a nucleic acid sequence comprising at least one regulatory nucleic acid sequence operably linked to at least one effector sequence. A first nucleic acid sequence is operably linked with a second nucleic acid sequence when the first nucleic acid sequence is placed in a functional relationship with the second nucleic acid sequence. For instance, a promoter or enhancer is operably linked to a coding sequence if the promoter or enhancer affects the transcription or expression of the coding sequence. Operably linked DNA sequences may be contiguous or non-contiguous. Where necessary to join two protein-coding regions, operably linked sequences may be in the same reading frame.

[0078] Host: The terms host genome or host cell, as used herein, refer to a cell and/or its genome into which protein and/or genetic material has been introduced. It should be understood that such terms are intended to refer not only to the particular subject cell and/or genome, but to the progeny of such a cell and/or the genome of the progeny of such a cell. Because certain modifications may occur in succeeding generations due to either mutation or environmental influences, such progeny may not, in fact, be identical to the parent cell, but are still included within the scope of the term “host cell” as used herein. A host genome or host cell may be an isolated cell or cell line grown in culture, or genomic material isolated from such a cell or cell line, or may be a host cell or host genome which composing living tissue or an organism. In some instances, a host cell may be an animal cell or a plant cell, e.g., as described herein. In certain instances, a host cell may be a bovine cell, horse cell, pig cell, goat cell, sheep cell, chicken cell, or turkey cell. In certain instances, a host cell may be a corn cell, soy cell, wheat cell, or rice cell.

[0079] Recombinase polypeptide: As used herein, a recombinase polypeptide refers to a polypeptide having the functional capacity to catalyze a recombination reaction of a nucleic acid molecule (e.g., a DNA molecule). A recombination reaction may include, for example, one or more nucleic acid strand breaks (e.g., a double-strand break), followed by joining of two nucleic acid strand ends (e.g., sticky ends). In some instances, the recombination reaction comprises insertion of an insert nucleic acid, e.g., into a target site, e.g., in a genome or a construct. In some instances, a recombinase polypeptide comprises one or more structural elements of a naturally occurring recombinase (e.g., a tyrosine recombinase, e.g., Cre recombinase or Flp recombinase). In certain instances, a recombinase polypeptide comprises an amino acid sequence having at least 70%, 75%, 80%, 85%, 90%, 95%, 96%, 97%, 98%, 99%, or 100% sequence identity to a recombinase described herein (e.g., as listed in Table 1 or 2). In some instances, a recombinase polypeptide has one or more functional features of a naturally occurring recombinase (e.g., a tyrosine recombinase, e.g., Cre recombinase or Flp recombinase). In some instances, a recombinase polypeptide recognizes (e.g., binds to) a recognition sequence in a nucleic acid molecule (e.g., a recognition sequence listed in Table 1 or 2, or a sequence having at least 70%, 75%, 80%, 85%, 90%, 95%, 96%, 97%, 98%, or 99% identity thereto). In some embodiments, a recombinase polypeptide is not active as an isolated monomer. In some embodiments, a recombinase polypeptide catalyzes a recombination reaction in concert with one or more other recombinase polypeptides (e.g., four recombinase polypeptides per recombination reaction).

[0080] Insert nucleic acid molecule: As used herein, an insert nucleic acid molecule (e.g., an insert DNA) is a nucleic acid molecule (e.g., a DNA molecule) that is or will be inserted, at least partially, into a target site within a target nucleic acid molecule (e.g., genomic DNA). An insert nucleic acid molecule may include, for example, a nucleic acid sequence that is heterologous relative to the target nucleic acid molecule (e.g., the genomic DNA). In some instances, an insert nucleic acid molecule comprises an object sequence (e.g., a heterologous object sequence). In some instances, an insert nucleic acid molecule comprises a DNA recognition sequence, e.g., a cognate to a DNA recognition sequence present in a target nucleic acid. In some embodiments, the insert nucleic acid molecule is circular, and in some embodiments, the insert nucleic acid molecule is linear. In some embodiments, an insert nucleic acid molecule is also referred to as a template nucleic acid molecule (e.g., a template DNA).

[0081] Recognition sequence: A recognition sequence (e.g., DNA recognition sequence) generally refers to a nucleic acid (e.g., DNA) sequence that is recognized (e.g., capable of being bound by) a recombinase polypeptide, e.g., as described herein. In some instances, a recognition sequence comprises two parapalindromic sequences, e.g., as described herein. In certain instances, the two parapalindromic sequences together form a parapalindromic region or a portion thereof. In some instances, the recognition sequence further comprises a core sequence, e.g., as described herein, positioned between the two parapalindromic sequences. In some instances, a recognition sequence comprises a nucleic acid sequence listed in Table 1, or a sequence having at least 70%, 75%, 80%, 85%, 90%, 95%, 96%, 97%, 98%, or 99% identity thereto.

[0082] Core sequence: A core sequence, as used herein, refers to a nucleic acid sequence positioned between two parapalindromic sequences. In some instances, a core sequence can be cleaved by a recombinase polypeptide (e.g., a recombinase polypeptide that recognizes a recognition sequence comprising the two parapalindromic sequences), e.g., to form sticky ends. In some embodiments, the core sequence is about 5-10 nucleotides, e.g., about 8 nucleotides in length.

[0083] Object sequence: As used herein, the term object sequence refers to a nucleic acid segment that can be desirably inserted into a target nucleic acid molecule, e.g., by a recombinase polypeptide, e.g., as described herein. In some embodiments, an insert DNA comprises a DNA recognition sequence and an object sequence that is heterologous to the DNA recognition sequence, generally referred to herein as a “heterologous object sequence.” An object sequence may, in some instances, be heterologous relative to the nucleic acid molecule into which it is inserted. In some instances, an object sequence comprises a nucleic acid sequence encoding a gene (e.g., a eukaryotic gene, e.g., a mammalian gene, e.g., a human gene) or other cargo of interest (e.g., a sequence encoding a functional RNA, e.g., an siRNA or miRNA), e.g., as described herein. In certain instances, the gene encodes a polypeptide (e.g., a blood factor or enzyme). In some instances, an object sequence comprises one or more of a nucleic acid sequence encoding a selectable marker (e.g., an auxotrophic marker or an antibiotic marker), and/or a nucleic acid control element (e.g., a promoter, enhancer, silencer, or insulator).

[0084] Parapalindromic: As used herein, the term parapalindromic refers to a property of a pair of nucleic acid sequences, wherein one of the nucleic acid sequences is either a palindrome relative to the other nucleic acid sequence, or has at least 50% (e.g., at least 50%, 55%, 60%, 65%, 70%, 75%, 80%, 85%, 90%, 95%, 96%, 97%, 98%, 99%, or 100%) sequence identity to a palindrome relative to the other nucleic acid sequence, or has no more than 1, 2, 3, 4, 5, 6, 7, or 8 sequence mismatches relative to the other nucleic acid sequence. “Parapalindromic sequences,” as used herein, refer to at least one of a pair of nucleic acid sequences that are parapalindromic relative to each other. A “parapalindromic region,” as used herein, refers to a nucleic acid sequence, or the portions thereof, that comprise two parapalindromic sequences. In some instances, a parapalindromic region comprises two paralindromic sequences flanking a nucleic acid segment, e.g., comprising a core sequence.

### BRIEF DESCRIPTION OF THE FIGURES

[0085] FIG. 1 shows a diagram of an exemplary recombinase reporter plasmid. An inactive reporter plasmid containing an inverted GFP gene flanked by recombinase recognition sites (e.g., loxP) in inverted orientation can be activated by the presence of a cognate recombinase (e.g., Cre), which results in flipping of the GFP gene into an orientation in which transcription of the coding sequence is driven by the upstream promoter (e.g., CMV).

[0086] FIG. 2 shows diagrams describing exemplary recombinase-mediated integration into the human genome. In the top diagram, a recombinase expressed from the recombinase expression plasmid recognizes a first target site on the insert DNA plasmid and a second target site in the human genome and catalyzes recombination between these two sites, resulting in integration of the insert DNA plasmid into the human genome at the second target site. In the bottom diagram, primer and probe positions for a ddPCR assay to quantify genomic integration events are shown.

### DETAILED DESCRIPTION

[0087] This disclosure relates to compositions, systems and methods for targeting, editing, modifying or manipulating a DNA sequence (e.g., inserting a heterologous object DNA sequence into a target site of a mammalian genome) at one or more locations in a DNA sequence in a cell, tissue or subject, e.g., in vivo or in vitro. The object DNA sequence may include, e.g., a coding sequence, a regulatory sequence, a gene expression unit.

### Gene-Writer™ Genome Editors

[0088] The present invention provides recombinase polypeptides (e.g., tyrosine recombinase polypeptides, e.g., as listed in Table 1 or 2) that can be used to modify or manipulate a DNA sequence, e.g., by recombining two DNA sequences comprising cognate recognition sequences that can be bound by the recombinase polypeptide. A Gene Writer™ gene editor system may, in some embodiments, comprise: (A) a polypeptide or a nucleic acid encoding a polypeptide, wherein the polypeptide comprises (i) a domain that contains recombinase activity, and (ii) a domain that contains DNA binding functionality (e.g., a DNA recognition domain that, for example, binds to or is capable of binding to a recognition sequence, e.g., as described herein); and (B) an insert DNA comprising (i) a sequence that binds the polypeptide (e.g., a recognition sequence as described herein) and, optionally, (ii) an object sequence (e.g., a heterologous object sequence). In some embodiments, the domain that contains recombinase activity and the domain that contains DNA binding functionality is the same domain. For example, the Gene Writer genome editor protein may comprise a DNA-binding domain and a recombinase domain. In certain embodiments, the elements of the Gene Writer™ gene editor polypeptide can be derived from sequences of a recombinase polypeptide (e.g., a tyrosine recombinase), e.g., as described herein, e.g., as listed in Table 1 or 2. In some embodiments the Gene Writer genome editor is combined with a second polypeptide. In some embodiments the second polypeptide is derived from a recombinase polypeptide (e.g., a tyrosine recombinase), e.g., as described herein, e.g., as listed in Table 1 or 2.

### Recombinase Polypeptide Component of Gene Writer Gene Editor System

[0089] An exemplary family of recombinase polypeptides that can be used in the systems, cells, and methods described herein includes the tyrosine recombinases. Generally, tyrosine recombinases are enzymes that catalyze site-specific recombination between two recognition sequences. The two recognition sequences may be, e.g., on the same nucleic acid (e.g., DNA) molecule, or may be present in two separate nucleic acid (e.g., DNA) molecules. In some embodiments, a tyrosine recombinase polypeptide comprises two domains, an N-terminal domain that comprises DNA contact sites, and a C-terminal domain that comprises the active site.

[0090] Tyrosine recombinases generally operate by concomitant binding of two recombinase polypeptide monomers to each of the recognition sequences, such that four monomers are involved in a single recombinase reaction. As described, for example, in Gaj et al. (2014; Biotechnol. Bioeng. 111(1): 1-15; incorporated herein by reference in its entirety), after binding of each pair of tyrosine recombinase monomers to the recognition sequences, the DNA-bound dimers then undergo DNA strand breaks, strand exchange, and rejoining to form Holliday junction intermediates, followed by an additional round of DNA strand breaks and ligation to form the recombined strands. Non-limiting examples of tyrosine recombinase include Cre recombinase and Flp recombinase, as well as the recombinase polypeptides listed in Table 1 or 2.

[0091] A skilled artisan can determine the nucleic acid and corresponding polypeptide sequences of a recombinase polypeptide (e.g., tyrosine recombinase) and domains thereof, e.g., by using routine sequence analysis tools as Basic Local Alignment Search Tool (BLAST) or CD-Search for conserved domain analysis. Other sequence analysis tools are known and can be found, e.g., at https://molbiol-tools.ca, for example, at https://molbiol-tools.ca/Motifs.htm.

[0092] Exemplary Recombinase Polypeptides

[0093] In some embodiments, a Gene Writer™ gene editor system comprises a recombinase polypeptide (e.g., a tyrosine recombinase polypeptide), e.g., as described herein. Generally, a recombinase polypeptide (e.g., a tyrosine recombinase polypeptide) specifically binds to a nucleic acid recognition sequence and catalyzes a recombination reaction at a site within the recognition sequence (e.g., a core sequence within the recognition sequence). In some embodiments, a recombinase polypeptide catalyzes recombination between a recognition sequence, or a portion thereof (e.g., a core sequence thereof) and another nucleic acid sequence (e.g., an insert DNA comprising a cognate recognition sequence and, optionally, an object sequence, e.g., a heterologous object sequence). For example, a recombinase polypeptide (e.g., a tyrosine recombinase polypeptide) may catalyze a recombination reaction that results in insertion of an object sequence, or a portion thereof, into another nucleic acid molecule (e.g., a genomic DNA molecule, e.g., a chromosome or mitochondrial DNA).

[0094] Table 1 below provides exemplary bidirectional tyrosine recombinase polypeptide amino acid sequences (see column 1), and their corresponding DNA recognition sequences (see columns 2 and 3), which were identified bioinformatically. Tables 1 and 2 comprise amino acid sequences that had not previously been identified as bidirectional tyrosine recombinases, and also includes corresponding DNA recognition sequences of tyrosine recombinases for which the DNA recognition sequences were previously unknown. The amino acid sequence of each accession number in column 1 of Table 1 is hereby incorporated by reference in its entirety.

[0095] More specifically, column 2 provides the native DNA recognition sequence (e.g., from bacteria or archaea), and column 3 provides a corresponding human DNA recognition sequence for the recombinase listed in that row. Column 4 indicates the genomic location of the human DNA recognition sequence of column 3. Column 5 provides the safe harbor score of the human DNA recognition sequence, indicating the number of safe harbor criteria met by the site.

[0096] The DNA recognition sequences of Table 1 have the following domains: a first parapalindromic sequence, a core sequence, and a second parapalindromic sequence. Without wishing to be bound by theory, in some embodiments, a tyrosine recombinase recognizes a DNA recognition sequence based on the parapalindromic region (the first and second parapalindromic sequences), and does not have any particular sequence requirements for the core sequence. Thus, in some embodiments, a tyrosine recombinase can insert DNA into a target site in the human genome, wherein the target site has a core sequence that may diverge substantially or completely from the native core sequence. Consequently, Table 1, column 2 includes Ns in these positions. In some embodiments, a core overlap sequence in an insert DNA may be chosen to match, at least partially, the corresponding sequence in the human genome. In some embodiments the recombinase only has a single human DNA recognition sequence.

TABLE 1
Exemplary tyrosine recombinases, corresponding recognition sequences, human
genomic locations thereof, and safe harbor score of the genomic location. As listed in the
DNA sequences, “N” can be any nucleotide (e.g., any one of A, C, G, or T).

| 1. | | | | | 4. Genomic | |
|---|---|---|---|---|---|---|
| Bidirectional | SEQ | 2. Native DNA | SEQ | 3. Human DNA | location of | 5. Safe |
| Tyrosine | ID | recognition | ID | recognition | human DNA | Harbor |
| Recombinase | NO: | sequence | NO: | sequence | sequence | Score |
| WP_0067171 | 1 | AATAAAGGGAATNN | 608 | AATAAAGGGAATAT | chr1:186448978- | 3 |
| 73.1 | | NNNNNNATTCCCTTT | | CTTATCATTCCCTTT | 186449009 | |
| | | ATT | | ATT | | |
| WP_0067185 | 2 | AATAAAGGGAATNN | 609 | AATAAAGGGAATAT | chr1:186448978- | 3 |
| 80.1 | | NNNNNNATTCCCTTT | | CTTATCATTCCCTTT | 186449009 | |
| | | ATT | | ATT | | |
| WP_0067192 | 3 | AATAAAGGGAATNN | 610 | AATAAAGGGAATAT | chr1:186448978- | 3 |
| 34.1 | | NNNNNNATTCCCTTT | | CTTATCATTCCCTTT | 186449009 | |
| | | ATT | | ATT | | |
| WP_1098591 | 4 | AATAAAGGGAATNN | 611 | AATAAAGGGAATAT | chr1:186448978- | 3 |
| 98.1 | | NNNNNNATTCCCTTT | | CTTATCATTCCCTTT | 186449009 | |
| | | ATT | | ATT | | |
| WP_0067171 | 5 | AATAAAGGGAATNN | 612 | AATAAAGGGAATAT | chr1:186448978- | 3 |
| 95.1 | | NNNNNNATTCCCTTT | | CTTATCATTCCCTTT | 186449009 | |
| | | ATT | | ATT | | |
| WP_0057157 | 6 | AATAAAGGGAATNN | 613 | AATAAAGGGAATAT | chr1:186448978- | 3 |
| 99.1 | | NNNNNNATTCCCTTT | | CTTATCATTCCCTTT | 186449009 | |
| | | ATT | | ATT | | |
| WP_1201665 | 7 | TTTTTTTGTATTNNNN | 614 | TTTTTTTGTATTTAA | chr15:98195234- | 5 |
| 65.1 | | NNNNNAAAAGAAAA | | AGAGGCAAAAGAA | 98195266 | |
| | | AAA | | AAAAA | | |
| WP_0613297 | 8 | TCTCTATATATANNN | 615 | TCTCTATATATATAT | chr18:34123564- | 5 |
| 56.1 | | NNNNNTATATATAGA | | GAGAATATATATAG | 34123595 | |
| | | GA | | AGA | | |
| WP_0104972 | 9 | AAAAATAAAACTGNN | 616 | AAAAATAAAACTGG | chr20:31321773- | 5 |
| 71.1 | | NNNNNNNTAGTTTTA | | GAAAAAAATAGTTT | 31321807 | |
| | | TTTTT | | TATTTTT | | |
| WP_0381509 | 10 | CACTGATATATANNN | 617 | CACTGATATATATC | chr3:164894717- | 6 |
| 96.1 | | NNNNTATATATCAGT | | ACTGATATATATCA | 164894747 | |
| | | G | | GTG | | |
| WP_0381508 | 11 | CACTGATATATANNN | 618 | CACTGATATATATC | chr3:164894717- | 6 |
| 98.1 | | NNNNTATATATCAGT | | ACTGATATATATCA | 164894747 | |
| | | G | | GTG | | |
| WP_0177400 | 12 | CAATTTTTGAAANNN | 619 | CAATTTTTGAAATTT | chr4:127054362- | 4 |
| 00.1 | | NNNNTTTCAAAAATT | | TCAATTTCAAAAATT | 127054392 | |
| | | G | | G | | |
| WP_0177442 | 13 | CAATTTTTGAAANNN | 620 | CAATTTTTGAAATTT | chr4:127054362- | 4 |
| 57.1 | | NNNNTTTCAAAAATT | | TCAATTTCAAAAATT | 127054392 | |
| | | G | | G | | |
| WP_0177461 | 14 | CAATTTTTGAAANNN | 621 | CAATTTTTGAAATTT | chr4:127054362- | 4 |
| 51.1 | | NNNNTTTCAAAAATT | | TCAATTTCAAAAATT | 127054392 | |
| | | G | | G | | |
| WP_1260450 | 15 | TAATGTTCTATANNN | 622 | TAATGTTCTATAATG | chr4:13893338- | 5 |
| 42.1 | | NNNNNTATAAAACAC | | TGGTTTATAAAACA | 13893369 | |
| | | TA | | CTA | | |
| XP_0123333 | 16 | TGCATATACATANNN | 623 | TGCATATACATATAT | chr5:127323005- | 6 |
| 05.1 | | NNNNNTATATATATG | | ATGCATATATATAT | 127323036 | |
| | | TA | | GTA | | |
| WP_0730250 | 17 | TTATGTCCAATANNN | 624 | TTATGTCCAATATAA | chr1:88050039- | 7 |
| 39.1 | | NNNNNTATTGGACAT | | AGCTATATTGGACA | 88050070 | |
| | | AG | | TAA | | |
| WP_0076355 | 18 | TTATGTCCAATANNN | 625 | TTATGTCCAATATAA | chr1:88050039- | 7 |
| 52.1 | | NNNNNTATTGGACAT | | AGCTATATTGGACA | 88050070 | |
| | | AG | | TAA | | |
| WP_0589581 | 19 | TGACTTCGTATANNN | 626 | TGACTTCGTATAAT | chr1:106584230- | 6 |
| 35.1 | | NNNNNTATACGAAGC | | AAACTTTATAGGAG | 106584261 | |
| | | CA | | GCCA | | |
| WP_0909670 | 20 | TGACTTCGTATANNN | 627 | TGACTTCGTATAAT | chr1:106584230- | 6 |
| 54.1 | | NNNNNTATACGAAGC | | AAACTTTATAGGAG | 106584261 | |
| | | CA | | GCCA | | |
| WP_0103653 | 21 | TAATGTCCAATANNN | 628 | TTATGTCCAATATAA | chr1:88050039- | 7 |
| 36.1 | | NNNNNTATCGGACAT | | AGCTATATTGGACA | 88050070 | |
| | | AA | | TAA | | |
| WP_0163928 | 22 | GACCACTCCAGANNN | 629 | GACCACTTCAGACA | chr13:80495061- | 7 |
| 93.1 | | NNNNNNTCTGGAGT | | AGATTGGTCTGGAA | 80495093 | |
| | | GGTG | | TGGTG | | |
| WP_0478245 | 23 | GGACATGTGATANNN | 630 | GGACATGTGATAAT | chr15:73681757- | 7 |
| 97.1 | | NNNNNTATCACATGT | | TCAATTTTGCACATG | 73681788 | |
| | | TG | | TTG | | |
| WP_0464074 | 24 | GCACTAGCGATANNN | 631 | GCACTAGCTATAGG | chr18:26615767- | 7 |
| 94.1 | | NNNNNTATCACTAGT | | AATTGGGATCACTA | 26615798 | |
| | | GC | | GTGC | | |
| WP_0037125 | 25 | CCCCTAACTAGANNN | 632 | CCCCTAATTAGAAC | chr2:211644330- | 6 |
| 23.1 | | NNNNTCTAATTAGGG | | ACATTTCTAATTATG | 211644360 | |
| | | G | | GG | | |
| WP_0050276 | 26 | CAGCCTCTTAGANNN | 633 | CAGCCTCTTAGCAA | chr3:39477201- | 7 |
| 58.1 | | NNNNTCTAAGGGGCT | | AAATTTTTAAGGGG | 39477231 | |
| | | T | | CTT | | |
| WP_0211703 | 27 | TAACTAATGATANNN | 634 | TAACTAGTGATAGA | chr5:110266294- | 7 |
| 77.1 | | NNNNNNTATCACTAG | | TAACAGTTATCACT | 110266326 | |
| | | TTG | | AGTTA | | |
| WP_0151699 | 28 | CTAAAGTAAGAGANN | 635 | CTGAAGTAAGAAAT | chr8:82693106- | 6 |
| 02.1 | | NNNNNNTTTCTTACT | | TTGCAAATTTCTTAC | 82693139 | |
| | | TCAG | | TTCAG | | |
| WP_0894151 | 29 | ATGACTTCGTATANN | 636 | ATGACTTCGTATAA | chr1:106584229- | 6 |
| 06.1 | | NNNNNNTATACGAA | | TAAACTTTATAGGA | 106584262 | |
| | | GTCAT | | GGCCAT | | |
| WP_0226242 | 30 | TGACTTCGTATANNN | 637 | TGACTTCGTATAAT | chr1:106584230- | 6 |
| 68.1 | | NNNNNTATACGAAGT | | AAACTTTATAGGAG | 106584261 | |
| | | CA | | GCCA | | |
| WP_0461030 | 31 | TGACTTCGTATANNN | 638 | TGACTTCGTATAAT | chr1:106584230- | 6 |
| 89.1 | | NNNNNTATACGAAGT | | AAACTTTATAGGAG | 106584261 | |
| | | CA | | GCCA | | |
| WP_0690271 | 32 | TGACTTCGTATANNN | 639 | TGACTTCGTATAAT | chr1:106584230- | 6 |
| 20.1 | | NNNNNTATACGAAGT | | AAACTTTATAGGAG | 106584261 | |
| | | CA | | GCCA | | |
| WP_0106719 | 33 | TGACTTCGTATANNN | 640 | TGACTTCGTATAAT | chr1:106584230- | 6 |
| 27.1 | | NNNNNTATACGAAGT | | AAACTTTATAGGAG | 106584261 | |
| | | CA | | GCCA | | |
| WP_1096537 | 34 | TGACTTCGTATANNN | 641 | TGACTTCGTATAAT | chr1:106584230- | 6 |
| 47.1 | | NNNNNTATACGAAGT | | AAACTTTATAGGAG | 106584261 | |
| | | CA | | GCCA | | |
| WP_1341619 | 35 | TGACTTCGTATANNN | 642 | TGACTTCGTATAAT | chr1:106584230- | 6 |
| 39.1 | | NNNNNTATACGAAGT | | AAACTTTATAGGAG | 106584261 | |
| | | CA | | GCCA | | |
| WP_1115348 | 36 | TGACTTCGTATANNN | 643 | TGACTTCGTATAAT | chr1:106584230- | 6 |
| 63.1 | | NNNNNTATACGAAGT | | AAACTTTATAGGAG | 106584261 | |
| | | CA | | GCCA | | |
| WP_1280855 | 37 | TGACTTCGTATANNN | 644 | TGACTTCGTATAAT | chr1:106584230- | 6 |
| 08.1 | | NNNNNTATACGAAGT | | AAACTTTATAGGAG | 106584261 | |
| | | CA | | GCCA | | |
| WP_1157646 | 38 | TGACTTCGTATANNN | 645 | TGACTTCGTATAAT | chr1:106584230- | 6 |
| 42.1 | | NNNNNTATACGAAGT | | AAACTTTATAGGAG | 106584261 | |
| | | CA | | GCCA | | |
| WP_1111383 | 39 | TGACTTCGTATANNN | 646 | TGACTTCGTATAAT | chr1:106584230- | 6 |
| 05.1 | | NNNNNTATACGAAGT | | AAACTTTATAGGAG | 106584261 | |
| | | CA | | GCCA | | |
| WP_0088397 | 40 | TCATGTCCGATANNN | 647 | TCATGACCTATATAC | chr1:165167590- | 5 |
| 47.1 | | NNNNNNTACCGGAC | | TTCTGGTACCAGAC | 165167622 | |
| | | ATAA | | ATAA | | |
| WP_0654178 | 41 | GATTTTTTTAACANNN | 648 | GATTTTTTTAACAAA | chr1:170443548- | 6 |
| 88.1 | | NNNNNNTATTATAAA | | AAATATATAATTAA | 170443582 | |
| | | AATC | | AAAATC | | |
| WP_0584139 | 42 | TGAGACGGGATANN | 649 | TGAGACTGCATAAA | chr1:190843617- | 6 |
| 92.1 | | NNNNNNNTATCCCAT | | TTATAAATATCCTAT | 190843649 | |
| | | CTGA | | CTGA | | |
| WP_0992351 | 43 | TGAGACGGGATANN | 650 | TGAGACTGCATAAA | chr1:190843617- | 6 |
| 64.1 | | NNNNNNNTATCCCAT | | TTATAAATATCCTAT | 190843649 | |
| | | CTGA | | CTGA | | |
| WP_0031395 | 44 | AAGCCATAGACANNN | 651 | AAGCCATAAAGATG | chr1:208272467- | 6 |
| 53.1 | | NNNNNTGTGTATGGC | | GGGCCTTGTGTCTG | 208272498 | |
| | | TT | | GCTT | | |
| WP_1328984 | 45 | GCTTGGTGCACANNN | 652 | GCATAGTGCACATT | chr1:212042241- | 7 |
| 17.1 | | NNNNTGTGACCCAAG | | AGACCTCTGACCCA | 212042271 | |
| | | C | | AGC | | |
| WP_1208099 | 46 | AAAAGCGTGATANNN | 653 | CAAAGCAGGATATT | chr1:214115937- | 5 |
| 06.1 | | NNNNNNTATCACGCC | | ATCAGGCTATCACG | 214115969 | |
| | | TTT | | CCTTT | | |
| WP_0757581 | 47 | CCGGCGCAAACANNN | 654 | CCGGCGCAGAAAG | chr1:21651977- | 4 |
| 85.1 | | NNNNNTGTTTGCGCC | | GGCCGCTTGTTCGC | 21652008 | |
| | | GC | | GCCGC | | |
| WP_0633139 | 48 | TGGCAAGCTATANNN | 655 | TGGCAAGCTATAAA | chr1:217009498- | 6 |
| 27.1 | | NNNNNNTATATCTTG | | ACAAGCATAAAACT | 217009530 | |
| | | CCA | | TCCCA | | |
| WP_0382026 | 49 | AAAGAAGCGATANN | 656 | AAAGAAGTGATAA | chr1:218206501- | 7 |
| 23.1 | | NNNNNNNTATCGCTT | | GAATTATTCATCTCT | 218206533 | |
| | | TTTT | | TTTTT | | |
| WP_1105609 | 50 | CTACTTCCGATANNN | 657 | CTCCTTCCAATAAA | chr1:236983188- | 6 |
| 45.1 | | NNNNNTGTCGGAAG | | GCCTTGTGTTGGAA | 236983219 | |
| | | TAG | | GTAG | | |
| WP_1023257 | 51 | CTACTTCCGATANNN | 658 | CTCCTTCCAATAAA | chr1:236983188- | 6 |
| 37.1 | | NNNNNTGTCGGAAG | | GCCTTGTGTTGGAA | 236983219 | |
| | | TAG | | GTAG | | |
| WP_1100959 | 52 | CTACTTCCGATANNN | 659 | CTCCTTCCAATAAA | chr1:236983188- | 6 |
| 79.1 | | NNNNNTGTCGGAAG | | GCCTTGTGTTGGAA | 236983219 | |
| | | TAG | | GTAG | | |
| WP_0141069 | 53 | CTACTTCCGATANNN | 660 | CTCCTTCCAATAAA | chr1:236983188- | 6 |
| 07.1 | | NNNNNTGTCGGAAG | | GCCTTGTGTTGGAA | 236983219 | |
| | | TAG | | GTAG | | |
| WP_0704062 | 54 | CTACTTCCGATANNN | 661 | CTCCTTCCAATAAA | chr1:236983188- | 6 |
| 27.1 | | NNNNNTGTCGGAAG | | GCCTTGTGTTGGAA | 236983219 | |
| | | TAG | | GTAG | | |
| WP_0396836 | 55 | TCTATATCCCATANNN | 662 | TCTATATACTATATA | chr1:239232551- | 6 |
| 93.1 | | NNNNNTATAGGATAT | | TAAGTATATAGTAT | 239232584 | |
| | | AGA | | ATAGA | | |
| WP_0581019 | 56 | ATTAGTCCCACANNN | 663 | TTTAGTCCCACAAAT | chr1:240346758- | 4 |
| 78.1 | | NNNNNNTGTGTGACT | | TTAAAATATGTGAC | 240346790 | |
| | | ACT | | TGCT | | |
| WP_0732883 | 57 | TTTAGGTATCATANN | 664 | TTTAGGCATCATGA | chr1:37227820- | 6 |
| 22.1 | | NNNNNNNTATGATG | | TGCTGGCATATGAT | 37227854 | |
| | | CCTAAA | | CCCTAAA | | |
| WP_1029063 | 58 | TTAGGTCTCATANNN | 665 | TTAGGTCTCTTTTTA | chr1:44815049- | 5 |
| 31.1 | | NNNNNTATGAGACCT | | CCTTGTAAGAGACC | 44815080 | |
| | | TA | | TTA | | |
| WP_0455723 | 59 | TCACTGTCCATANNN | 666 | TCACTGTCCTTATCT | chr1:58905291- | 7 |
| 21.1 | | NNNNCATGGACAGT | | ACAACATGGAGATT | 58905321 | |
| | | GA | | GA | | |
| WP_0413384 | 60 | CAATGTCCAATANNN | 667 | TTATGTCCAATATAA | chr1:88050039- | 7 |
| 71.1 | | NNNNNTATTGGACAT | | AGCTATATTGGACA | 88050070 | |
| | | TA | | TAA | | |
| WP_0110437 | 61 | CTATGTCCGATANNN | 668 | TTATGTCCAATATAA | chr1:88050039- | 7 |
| 09.1 | | NNNNNTATTGGACAT | | AGCTATATTGGACA | 88050070 | |
| | | AG | | TAA | | |
| WP_0417369 | 62 | CTATGTCCGATANNN | 669 | TTATGTCCAATATAA | chr1:88050039- | 7 |
| 50.1 | | NNNNNTATTGGACAT | | AGCTATATTGGACA | 88050070 | |
| | | AG | | TAA | | |
| WP_0703749 | 63 | CTATGTCCGATANNN | 670 | TTATGTCCAATATAA | chr1:88050039- | 7 |
| 86.1 | | NNNNNTATTGGACAT | | AGCTATATTGGACA | 88050070 | |
| | | AG | | TAA | | |
| WP_0330821 | 64 | CTATGTCCGATANNN | 671 | TTATGTCCAATATAA | chr1:88050039- | 7 |
| 29.1 | | NNNNNTATTGGACAT | | AGCTATATTGGACA | 88050070 | |
| | | AG | | TAA | | |
| WP_0571809 | 65 | CTATGTCCGATANNN | 672 | TTATGTCCAATATAA | chr1:88050039- | 7 |
| 66.1 | | NNNNNTATTGGACAT | | AGCTATATTGGACA | 88050070 | |
| | | AG | | TAA | | |
| WP_0517439 | 66 | TTATGTCCGATANNN | 673 | TTATGTCCAATATAA | chr1:88050039- | 7 |
| 15.1 | | NNNNNTATCGGACAT | | AGCTATATTGGACA | 88050070 | |
| | | AT | | TAA | | |
| WP_0725989 | 67 | TTATGTCCGATANNN | 674 | TTATGTCCAATATAA | chr1:88050039- | 7 |
| 06.1 | | NNNNNTCTCGGACAT | | AGCTATATTGGACA | 88050070 | |
| | | AA | | TAA | | |
| WP_0693376 | 68 | TTATGTCCGATANNN | 675 | TTATGTCCAATATAA | chr1:88050039- | 7 |
| 75.1 | | NNNNNTCTCGGACAT | | AGCTATATTGGACA | 88050070 | |
| | | AA | | TAA | | |
| WP_0607342 | 69 | GCTTGCGACATANNN | 676 | GGTTGCGACATACA | chr1:94419447- | 5 |
| 94.1 | | NNNNNTATGTCGCAA | | GGTATGTATGTCAC | 94419478 | |
| | | AC | | ATAC | | |
| WP_0363653 | 70 | TTTGTTGGTATANNN | 677 | TTTGAGGGTATTTA | chr1:99638466- | NA |
| 62.1 | | NNNNNTATACCAACA | | TTTTGCTATACCAAC | 99638497 | |
| | | AA | | AAA | | |
| WP_0886525 | 71 | CTATGTCCAATANNN | 678 | CTATGTACATTATCT | chr10:107928889- | 5 |
| 86.1 | | NNNNNNTATTGGAC | | TATATTTATTGGACA | 107928921 | |
| | | ATGA | | TGT | | |
| PLX79396.1 | 72 | TCAGCCGGAAGANN | 679 | TCAGCCGGAAGGTG | chr10:111439026- | 6 |
| | | NNNNNTCTTGCGGCT | | GAACTTCTGGCAGC | 111439056 | |
| | | GC | | TGC | | |
| WP_0128527 | 73 | AAACCCTACAGANNN | 680 | AAACCCTACAGAAT | chr10:112359538- | 4 |
| 32.1 | | NNNNNTCTGTAGGGT | | TGTACTTCTGAAGG | 112359569 | |
| | | TA | | ATCA | | |
| WP_0128527 | 74 | AAACCCTACAGANNN | 681 | AAACCCTACAGAAT | chr10:112359538- | 4 |
| 33.1 | | NNNNNTCTGTAGGGT | | TGTACTTCTGAAGG | 112359569 | |
| | | TA | | ATCA | | |
| WP_0659354 | 75 | TTAGGTCTGATANNN | 682 | TTAGGTCTGATATA | chr10:120864993- | 5 |
| 87.1 | | NNNNNNTATCCGACC | | AATGAAGTCTTTGA | 120865025 | |
| | | CAA | | CCCAA | | |
| WP_0104523 | 76 | TCACATGGGATANNN | 683 | TTACTTGGGATACA | chr10:121206254- | 6 |
| 01.1 | | NNNNNNTACCCCGTG | | AAATCTGTACCCAG | 121206286 | |
| | | TGA | | TGTGA | | |
| WP_0902087 | 77 | TCACATGGGATANNN | 684 | TTACTTGGGATACA | chr10:121206254- | 6 |
| 26.1 | | NNNNNNTACCCCGTG | | AAATCTGTACCCAG | 121206286 | |
| | | TGA | | TGTGA | | |
| WP_0621521 | 78 | TCATCGTACATANNN | 685 | TCCTCTTACATACTT | chr10:131836361- | 5 |
| 19.1 | | NNNNNTATGTATGAT | | TAAAATATGTATGA | 131836392 | |
| | | GA | | TTA | | |
| WP_0131963 | 79 | TATGACTCCAGANNN | 686 | TATGACTTCAAACT | chr10:32990424- | 7 |
| 26.1 | | NNNNNNTCTGGAGT | | GTTATTCTCTGGAG | 32990456 | |
| | | CACA | | TCATA | | |
| WP_0135778 | 80 | TATGACTCCAGANNN | 687 | TATGACTTCAAACT | chr10:32990424- | 7 |
| 22.1 | | NNNNNNTCTGGAGT | | GTTATTCTCTGGAG | 32990456 | |
| | | CACA | | TCATA | | |
| WP_0393899 | 81 | TATGACTCCAGANNN | 688 | TATGACTTCAAACT | chr10:32990424- | 7 |
| 14.1 | | NNNNNNTCTGGAGT | | GTTATTCTCTGGAG | 32990456 | |
| | | CACA | | TCATA | | |
| WP_0337689 | 82 | TGTGACTCCAGANNN | 689 | TATGACTTCAAACT | chr10:32990424- | 7 |
| 26.1 | | NNNNNNTCTGGAGT | | GTTATTCTCTGGAG | 32990456 | |
| | | CATA | | TCATA | | |
| WP_0567737 | 83 | TGTGACTCCAGANNN | 690 | TATGACTTCAAACT | chr10:32990424- | 7 |
| 90.1 | | NNNNNNTCTGGAGT | | GTTATTCTCTGGAG | 32990456 | |
| | | CATA | | TCATA | | |
| WP_0120758 | 84 | TTAAGTCTGATANNN | 691 | TTAAGTCAAATATCT | chr10:60537494- | 6 |
| 09.1 | | NNNNNNTATCCGACC | | ACTAGATATCCCAC | 60537526 | |
| | | TAA | | CTAA | | |
| WP_0339867 | 85 | TTAAGTCTGATANNN | 692 | TTAAGTCAAATATCT | chr10:60537494- | 6 |
| 89.1 | | NNNNNNTATCCGACC | | ACTAGATATCCCAC | 60537526 | |
| | | TAA | | CTAA | | |
| WP_0057522 | 86 | TTGCAAGGAACANNN | 693 | TTGCAAGGAACTGT | chr10:61854428- | 5 |
| 18.1 | | NNNNNTGCTCCTTGC | | TAAGAATTTTCCTTG | 61854459 | |
| | | AT | | CAT | | |
| WP_0112718 | 87 | TTGCAAGGAACANNN | 694 | TTGCAAGGAACTGT | chr10:61854428- | 5 |
| 67.1 | | NNNNNTGCTCCTTGC | | TAAGAATTTTCCTTG | 61854459 | |
| | | AT | | CAT | | |
| WP_0694813 | 88 | CTTATTAATTAATANN | 695 | CTTGATAATTAATA | chr10:63808356- | 7 |
| 44.1 | | NNNNNTATTAATTAA | | ATGAGGTTATTAAT | 63808390 | |
| | | TAAG | | TAATAAT | | |
| WP_0928377 | 89 | TCACTCACGATANNN | 696 | TCACCCACGTCACC | chr10:86883137- | 4 |
| 35.1 | | NNNNNNTATCGTGG | | CTTGGATTATCGTG | 86883169 | |
| | | GTAA | | GGTAA | | |
| WP_0572029 | 90 | TTACCCACGATANNN | 697 | TCACCCACGTCACC | chr10:86883137- | 4 |
| 84.1 | | NNNNNNTATCGTGG | | CTTGGATTATCGTG | 86883169 | |
| | | GTAA | | GGTAA | | |
| WP_0572675 | 91 | TTACCCACGATANNN | 698 | TCACCCACGTCACC | chr10:86883137- | 4 |
| 49.1 | | NNNNNNTATCGTGG | | CTTGGATTATCGTG | 86883169 | |
| | | GTAA | | GGTAA | | |
| WP_0770196 | 92 | TACGGGGAAAGANN | 699 | TAGGAGGAAAGAC | chr11:100278888- | 5 |
| 34.1 | | NNNNNTCTTTCCCCG | | TTTCAGTCTTTCCCC | 100278918 | |
| | | TT | | ATT | | |
| WP_0837688 | 93 | TCAAGATGAACANNN | 700 | TCAAGATGAACAAA | chr11:134140724- | 5 |
| 87.1 | | NNNNNNTGTTTATCT | | CCACATATGTGTTTT | 134140756 | |
| | | TGA | | TTGA | | |
| ACZ42745.1 | 94 | TCAAGATGAACANNN | 701 | TCAAGATGAACAAA | chr11:134140724- | 5 |
| | | NNNNNNTGTTTATCT | | CCACATATGTGTTTT | 134140756 | |
| | | TGA | | TTGA | | |
| WP_0590616 | 95 | TTAACTTGAATANNN | 702 | TTAATTTGAATATAA | chr11:21310918- | 6 |
| 37.1 | | NNNNNCATTCAAGCT | | TCTGTCATTCAAGTT | 21310949 | |
| | | AA | | GA | | |
| WP_0569745 | 96 | AATCGTTGATATANN | 703 | AATCATTCATATATA | chr11:39698382- | 6 |
| 19.1 | | NNNNNNTATATTAAC | | TATATATATATTAAC | 39698415 | |
| | | GTTT | | ATTT | | |
| WP_0033308 | 97 | AACAAGAGCAGANN | 704 | AACAGGAACACACA | chr11:72593387- | 6 |
| 82.1 | | NNNNNNCCTGCTCTT | | CTTACACCTGCTCTT | 72593418 | |
| | | GCT | | GCT | | |
| WP_0008767 | 98 | TGAGTATTTATATAN | 705 | TGAGTATTTATATAT | chr11:95634315- | 6 |
| 35.1 | | NNNNNNNTATGTAA | | ACTTGAGTATATAT | 95634350 | |
| | | ATACTCA | | ATACACA | | |
| WP_0198215 | 99 | TGATCGATAACANNN | 706 | TGATCAATAACACC | chr11:98224565- | 5 |
| 68.1 | | NNNNTGTTATCGATT | | AAGCCTGTCATCAA | 98224595 | |
| | | A | | TTA | | |
| WP_0112393 | 100 | TTACATTCGATANNN | 707 | TTAGATTCAATATTT | chr12:103480844- | 4 |
| 95.1 | | NNNNNNTATCGGAT | | TTGAATTATTGGAT | 103480876 | |
| | | GTAA | | GTAA | | |
| WP_0136957 | 101 | TTACTTCCGATANNN | 708 | TTACATCTGATAAG | chr12:105057007- | 5 |
| 83.1 | | NNNNNNTATCGGAA | | GATCTAGTATCGAA | 105057039 | |
| | | ATAT | | AATAT | | |
| YP_0091255 | 102 | GCCCTGGTCAGANNN | 709 | GCCCTGGTGACAGG | chr12:119742033- | 7 |
| 17.1 | | NNNNNTCTGACCGG | | GGAGTCTCTGACCT | 119742064 | |
| | | GGC | | GGGC | | |
| WP_0620417 | 103 | GCGTGACGCAGANN | 710 | GCGTGAGGAAGAG | chr12:15116187- | 6 |
| 33.1 | | NNNNNNNTCTGCGTC | | CAGCCCATTCTGCA | 15116219 | |
| | | ACGC | | TCACGC | | |
| WP_0448784 | 104 | CACCTCCAAATANNN | 711 | AACCCCCAAATAGT | chr12:23398673- | 4 |
| 38.1 | | NNNNNNTATTAGGA | | TAACCTATATTAGG | 23398705 | |
| | | GGTC | | TGGTC | | |
| KPU82353.1 | 105 | TTATTTCCGATANNN | 712 | TTATTTCCTATATTT | chr12:29882634- | 7 |
| | | NNNNNNTATCGGAA | | TAAGTTTATAAGAA | 29882666 | |
| | | AAAA | | AAAA | | |
| WP_0484992 | 106 | ATLTTTGTCAGANNN | 713 | ATATTTGTCAGAAA | chr12:30608656- | 7 |
| 02.1 | | NNNNCCCGACAAAG | | AAAAATCTGACAAA | 30608686 | |
| | | AT | | GAT | | |
| YP_195916.1 | 107 | TCTATGGACATANNN | 714 | TCTATGTACATAGG | chr12:31904100- | 6 |
| | | NNNNNAATGTCCATA | | TATGTCTATGTACAT | 31904131 | |
| | | GA | | AGA | | |
| WP_0133971 | 108 | TCTATGGACATANNN | 715 | TCTATGTACATAGG | chr12:31904100- | 6 |
| 05.1 | | NNNNNAATGTCCATA | | TATGTCTATGTACAT | 31904131 | |
| | | GA | | AGA | | |
| WP_0575912 | 109 | TCTATGGACATANNN | 716 | TCTATGTACATAGG | chr12:31904100- | 6 |
| 91.1 | | NNNNNAATGTCCATA | | TATGTCTATGTACAT | 31904131 | |
| | | GA | | AGA | | |
| WP_1140706 | 110 | ATTAGTTATGATANN | 717 | ATTAGTTATGATAA | chr12:33682974- | 4 |
| 45.1 | | NNNNNNNTATCGTA | | ATATGACATAACAC | 33683008 | |
| | | AGTAAT | | AAGTAAT | | |
| WP_1201285 | 111 | TAGAAAGCCATANNN | 718 | AAGAAAGCCATGG | chr12:48381088- | 7 |
| 27.1 | | NNNNNNTATGGCTTC | | ACATCAATTATGGC | 48381120 | |
| | | CTG | | TTCATG | | |
| WP_0147866 | 112 | TTACCTCCGACANNN | 719 | TTCCCTCAGACAAT | chr12:50098705- | 6 |
| 80.1 | | NNNNNTGTCGTGGG | | GACTGATGTGGTGG | 50098736 | |
| | | TAA | | GTAA | | |
| WP_0656537 | 113 | TTACTTCCGATANNN | 720 | GTACTTCCCATAGG | chr12:53017915- | 5 |
| 36.1 | | NNNNNTATCGGAAG | | TGTTGGTATCTGAA | 53017946 | |
| | | TAG | | GTAC | | |
| WP_0823040 | 114 | TTACTTCCGATANNN | 721 | GTACTTCCCATAGG | chr12:53017915- | 5 |
| 40.1 | | NNNNNTATCGGAAG | | TGTTGGTATCTGAA | 53017946 | |
| | | TAC | | GTAC | | |
| WP_0767290 | 115 | CAACGTCTGATANNN | 722 | CTAAGTCTGATAGG | chr12:61149603- | 7 |
| 31.1 | | NNNNNNTATCAGAC | | ACTTTTTTATCAGAC | 61149635 | |
| | | GTAG | | TTAG | | |
| WP_0123298 | 116 | CAACGTCTGATANNN | 723 | CTAAGTCTGATAGG | chr12:61149603- | 7 |
| 41.1 | | NNNNNNTATCAGAC | | ACTTTTTTATCAGAC | 61149635 | |
| | | GTAG | | TTAG | | |
| KIU27889.1 | 117 | CAACGTCTGATANNN | 724 | CTAAGTCTGATAGG | chr12:61149603- | 7 |
| | | NNNNNNTATCAGAC | | ACTTTTTTATCAGAC | 61149635 | |
| | | GTAG | | TTAG | | |
| WP_0293617 | 118 | CTACGTCTGATANNN | 725 | CTAAGTCTGATAGG | chr12:61149603- | 7 |
| 46.1 | | NNNNNNTATCAGAC | | ACTTTTTTATCAGAC | 61149635 | |
| | | GTTG | | TTAG | | |
| WP_0123298 | 119 | CTACGTCTGATANNN | 726 | CTAAGTCTGATAGG | chr12:61149603- | 7 |
| 56.1 | | NNNNNNTATCAGAC | | ACTTTTTTATCAGAC | 61149635 | |
| | | GTTG | | TTAG | | |
| WP_0120104 | 120 | AAGCATGACACANNN | 727 | AAGCATGAAACAGA | chr12:69370960- | 5 |
| 52.1 | | NNNNCGTGCCATGCT | | ATGTAAGTGCCATG | 69370990 | |
| | | T | | CAT | | |
| WP_0853611 | 121 | TAGGTATTGATANNN | 728 | TAGGTATTGATATG | chr12:89090193- | 5 |
| 67.1 | | NNNNNTCTCACTACC | | GTTTGGTGTCCCTA | 89090224 | |
| | | TA | | CCCA | | |
| WP_0078582 | 122 | AAATACCACAGANNN | 729 | AAATAACACAGCAA | chr12:90787740- | 6 |
| 08.1 | | NNNNNTCTGCGGTAC | | CTCCACTCTGGGGT | 90787771 | |
| | | TT | | ACTT | | |
| WP_0460272 | 123 | TTAGGTTGGATANNN | 730 | TTAGGTTGGCTAAG | chr13:54916637- | 7 |
| 27.1 | | NNNNNNTATCAGACC | | ATAAGAAAATCAGA | 54916669 | |
| | | TAA | | CCAAA | | |
| OUV98802.1 | 124 | ATTACTATTGATANN | 731 | AATAATATTGATAT | chr13:63134582- | 5 |
| | | NNNNNNNTATCATTA | | CAACTAATTATCATC | 63134616 | |
| | | GTAAT | | AGTAAT | | |
| WP_0755008 | 125 | ATTACTATTGATANN | 732 | AATAATATTGATAT | chr13:63134582- | 5 |
| 61.1 | | NNNNNNNTATCATTA | | CAACTAATTATCATC | 63134616 | |
| | | GTAAT | | AGTAAT | | |
| WP_0119065 | 126 | GATAACAAGATANNN | 733 | TATAACAAGATACA | chr13:75289152- | 6 |
| 04.1 | | NNNNNNTATCTTGTT | | GCCTGTTTATCTTG | 75289184 | |
| | | ATC | | GTATA | | |
| WP_0142690 | 127 | TATCCAATGTATANN | 734 | TATACATTGTATATA | chr13:82628490- | 6 |
| 99.1 | | NNNNNNNTATACATT | | CATTGTATATACATT | 82628524 | |
| | | GGATA | | GTATA | | |
| WP_0023288 | 128 | GGAAAACGTAGANN | 735 | GGAAAACTTAGAAA | chr13:84656932- | 6 |
| 98.1 | | NNNNNNTCTACGTTT | | GAATCTTCCACTTTT | 84656963 | |
| | | TCC | | TCC | | |
| WP_0512794 | 129 | CTAGTCATGATANNN | 736 | GTAGTCATGATATT | chr13:93786373- | 5 |
| 02.1 | | NNNNNTATCGTGACT | | TCTTACTATTATGAC | 93786404 | |
| | | AT | | TAT | | |
| WP_0580022 | 130 | CCTTAATAGACANNN | 737 | CACTAATAGACATA | chr14:102832746- | 5 |
| 97.1 | | NNNNNNTATCTATTA | | GCAGTAATATATAT | 102832778 | |
| | | AGC | | TAAGC | | |
| WP_0140808 | 131 | GGTGCAACCACANNN | 738 | GGTGCCACCACATG | chr14:105806860- | 7 |
| 79.1 | | NNNNTGTGGCTGCAC | | TCATGTATGGCTGC | 105806890 | |
| | | C | | CCC | | |
| WP_0344654 | 132 | CTTTCGGACAGANNN | 739 | CGTTGGGACAGATG | chr14:106294549- | 5 |
| 37.1 | | NNNNNTATGTCTGAA | | TGTGTACATGTCTG | 106294580 | |
| | | AG | | AAAG | | |
| WP_0150459 | 133 | TAATCCGTAATANNN | 740 | TAATCCTTAATACTA | chr14:37532388- | 6 |
| 88.1 | | NNNNTTTAACGGATT | | ACACTTTAACGCAT | 37532418 | |
| | | A | | AA | | |
| WP_1254404 | 134 | TTAGTACCGATANNN | 741 | TTACTACCAATATAA | chr14:52339287- | 6 |
| 93.1 | | NNNNNNTATCGGTAC | | CAACACTACCAGTA | 52339319 | |
| | | TAA | | CTAA | | |
| TDN36797.1 | 135 | TTAGTACCGATANNN | 742 | TTACTACCAATATAA | chr14:52339287- | 6 |
| | | NNNNNNTATCAGTAC | | CAACACTACCAGTA | 52339319 | |
| | | TAA | | CTAA | | |
| WP_1336591 | 136 | TTAGTACCGATANNN | 743 | TTACTACCAATATAA | chr14:52339287- | 6 |
| 53.1 | | NNNNNNTATCAGTAC | | CAACACTACCAGTA | 52339319 | |
| | | TAA | | CTAA | | |
| OUW60929.1 | 137 | TTTTTTCCGATANNNN | 744 | TTTTTTCCTATAGTT | chr14:63944046- | NA |
| | | NNNNNTATCGGAAAT | | TTCTGGTATTTGAA | 63944078 | |
| | | AT | | ATAT | | |
| WP_0089163 | 138 | AAAGTACCAACANNN | 745 | AAAGGACCAACTTT | chr14:66956028- | 5 |
| 47.1 | | NNNNTGTTGATACTT | | GATTTTGTTGATTCT | 66956058 | |
| | | T | | TT | | |
| WP_0168003 | 139 | CAAAAGGCGACANN | 746 | CAAATGTAGACAGT | chr14:67334559- | 6 |
| 55.1 | | NNNNNTGTCGCCTTT | | TTATATGTCGCCTTT | 67334589 | |
| | | TT | | TT | | |
| WP_0292037 | 140 | CAAAAGGCGACANN | 747 | CAAATGTAGACAGT | chr14:67334559- | 6 |
| 06.1 | | NNNNNTGTCGCCTTT | | TTATATGTCGCCTTT | 67334589 | |
| | | TT | | TT | | |
| WP_0300647 | 141 | TGACTCCTGATANNN | 748 | TAACTCCTGGTAAA | chr14:71732258- | 6 |
| 47.1 | | NNNNNTCTCTGGAGT | | CAGGTCTTTCTGGA | 71732289 | |
| | | CA | | GTCA | | |
| WP_0484742 | 142 | CCGTCATGGATANNN | 749 | CCGTCATGGGGCTT | chr14:93647060- | 6 |
| 44.1 | | NNNNNTATCCATGAA | | ATAGTCTATCCATG | 93647091 | |
| | | GC | | AAGC | | |
| WP_1093140 | 143 | TTACACATGATANNN | 750 | TTATACATGATATAC | chr14:94716806- | 5 |
| 41.1 | | NNNNNNTATCATGTG | | ATAACATATCATGT | 94716838 | |
| | | TAA | | ATTA | | |
| WP_0292243 | 144 | CAAAAGGCGACANN | 751 | CAAAAGGAGACAG | chr14:97951200- | 7 |
| 90.1 | | NNNNNNTGTCGCCTT | | GCATATTTTTCCCCT | 97951231 | |
| | | TTT | | TTTT | | |
| WP_0106467 | 145 | CAAAAGGCGACANN | 752 | CAAAAGGAGACAG | chr14:97951200- | 7 |
| 15.1 | | NNNNNNTGTCGCCTT | | GCATATTTTTCCCCT | 97951231 | |
| | | TTT | | TTTT | | |
| WP_0217104 | 146 | CAAAAGGCGACANN | 753 | CAAAAGGAGACAG | chr14:97951200- | 7 |
| 15.1 | | NNNNNNTGTCGCCTT | | GCATATTTTTCCCCT | 97951231 | |
| | | TTT | | TTTT | | |
| WP_0119992 | 147 | CAAAAGGCGACANN | 754 | CAAAAGGAGACAG | chr14:97951200- | 7 |
| 82.1 | | NNNNNNTGTCGCCTT | | GCATATTTTTCCCCT | 97951231 | |
| | | TTT | | TTTT | | |
| WP_0506492 | 148 | CAAAAGGCGACANN | 755 | CAAAAGGAGACAG | chr14:97951200- | 7 |
| 39.1 | | NNNNNNTGTCGCCTT | | GCATATTTTTCCCCT | 97951231 | |
| | | TTT | | TTTT | | |
| WP_0519410 | 149 | TTGAGTGCTACANNN | 756 | CTGGGTGCTCCAGG | chr15:23506248- | 6 |
| 91.1 | | NNNNNNTGTAGCACT | | GGCTCTCTGTAGCA | 23506280 | |
| | | CAA | | CTCAA | | |
| WP_0653470 | 150 | TTGAGTGCTACANNN | 757 | CTGGGTGCTCCAGG | chr15:23506248- | 6 |
| 10.1 | | NNNNNNTGTAGCACT | | GGCTCTCTGTAGCA | 23506280 | |
| | | CAA | | CTCAA | | |
| WP_0496814 | 151 | GAACCCTTGATANNN | 758 | GAACACTTTATAAG | chr15:43410177- | 6 |
| 75.1 | | NNNNTATCAAGGGTT | | TTATATATGAAGGG | 43410207 | |
| | | T | | TTT | | |
| WP_0253152 | 152 | AACAGATCAATANNN | 759 | AAAAGATCAATAAA | chr15:47468716- | 6 |
| 61.1 | | NNNNGATTGATCTGT | | GCACAGATTGAATT | 47468746 | |
| | | T | | GTT | | |
| WP_0380697 | 153 | TTATGTCCAATANNN | 760 | TTATTTCCAATAAAT | chr15:54938190- | 8 |
| 93.1 | | NNNNNNTATCGGAC | | CAGAATTATAGCAC | 54938222 | |
| | | ATGA | | ATGA | | |
| WP_0068610 | 154 | AACAACCACATANNN | 761 | AAAAACCACATATT | chr15:58808569- | 6 |
| 39.1 | | NNNNNTATGTGGTTG | | ATAAAATATATGGT | 58808600 | |
| | | TT | | TTTT | | |
| WP_1023690 | 155 | TCAGATGGGATANNN | 762 | TCAGTTGGGATACA | chr15:90749251- | 7 |
| 17.1 | | NNNNNNTATCCCGTG | | ATTAATGTAACCTG | 90749283 | |
| | | TGA | | TGTGA | | |
| WP_0032125 | 156 | TCAGATGGGATANNN | 763 | TCAGTTGGGATACA | chr15:90749251- | 7 |
| 74.1 | | NNNNNNTATCCCGTG | | ATTAATGTAACCTG | 90749283 | |
| | | TGA | | TGTGA | | |
| WP_1026049 | 157 | TCAGATGGGATANNN | 764 | TCAGTTGGGATACA | chr15:90749251- | 7 |
| 09.1 | | NNNNNNTATCCCGTG | | ATTAATGTAACCTG | 90749283 | |
| | | TGA | | TGTGA | | |
| WP_0084325 | 158 | TCAGATGGGATANNN | 765 | TCAGTTGGGATACA | chr15:90749251- | 7 |
| 17.1 | | NNNNNNTATCCCGTG | | ATTAATGTAACCTG | 90749283 | |
| | | TGA | | TGTGA | | |
| WP_0028923 | 159 | AAAATAGCGATANNN | 766 | AAAATAGGGATAAC | chr16:13245429- | 5 |
| 42.1 | | NNNNTATCGCTATTA | | AATAGTATCTCTATC | 13245459 | |
| | | T | | AT | | |
| WP_0028871 | 160 | AAAATAGCGATANNN | 767 | AAAATAGGGATAAC | chr16:13245429- | 5 |
| 64.1 | | NNNNTATCGCTATTA | | AATAGTATCTCTATC | 13245459 | |
| | | T | | AT | | |
| WP_0705783 | 161 | AAAATAGCGATANNN | 768 | AAAATAGGGATAAC | chr16:13245429- | 5 |
| 46.1 | | NNNNTATCGCTATTA | | AATAGTATCTCTATC | 13245459 | |
| | | T | | AT | | |
| WP_0115302 | 162 | CTACTCCGCAGANNN | 769 | CTCCTCCGCAGAAG | chr16:19016625- | 5 |
| 52.1 | | NNNNNTCTGCGGAG | | TCTGTGTCTGGGGA | 19016656 | |
| | | TAA | | GCAA | | |
| WP_0058340 | 163 | TTAGGGAGAAGANN | 770 | TTAGGGAGGAGAC | chr16:35081954- | 5 |
| 81.1 | | NNNNNNNTCTTCTCC | | AAGGCTGTTCTTTTC | 35081986 | |
| | | CTAC | | CCTCC | | |
| WP_1002941 | 164 | CAAGTATCGATANNN | 771 | CATGTATAGATATA | chr16:48917302- | 4 |
| 15.1 | | NNNNNTATCGATACT | | TATGCATATAGATA | 48917333 | |
| | | TA | | CTTA | | |
| WP_0412342 | 165 | CAAGTATCGATANNN | 772 | CATGTATAGATATA | chr16:48917302- | 4 |
| 71.1 | | NNNNNTATCGATACT | | TATGCATATAGATA | 48917333 | |
| | | TA | | CTTA | | |
| WP_0412020 | 166 | CAAGTATCGATANNN | 773 | CATGTATAGATATA | chr16:48917302- | 4 |
| 99.1 | | NNNNNTATCGATACT | | TATGCATATAGATA | 48917333 | |
| | | TA | | CTTA | | |
| WP_0888689 | 167 | CAAGTATCGATANNN | 774 | CATGTATAGATATA | chr16:48917302- | 4 |
| 73.1 | | NNNNNTATCGATACT | | TATGCATATAGATA | 48917333 | |
| | | TA | | CTTA | | |
| WP_0695548 | 168 | CAAGTATCGATANNN | 775 | CATGTATAGATATA | chr16:48917302- | 4 |
| 70.1 | | NNNNNTATCGATACT | | TATGCATATAGATA | 48917333 | |
| | | TA | | CTTA | | |
| WP_1032520 | 169 | CAAGTATCGATANNN | 776 | CATGTATAGATATA | chr16:48917302- | 4 |
| 06.1 | | NNNNNTATCGATACT | | TATGCATATAGATA | 48917333 | |
| | | TA | | CTTA | | |
| WP_1270056 | 170 | CAAGTATCGATANNN | 777 | CATGTATAGATATA | chr16:48917302- | 4 |
| 24.1 | | NNNNNTATCGATACT | | TATGCATATAGATA | 48917333 | |
| | | TA | | CTTA | | |
| SIQ01063.1 | 171 | CAAGTATCGATANNN | 778 | CATGTATAGATATA | chr16:48917302- | 4 |
| | | NNNNNTATCGATACT | | TATGCATATAGATA | 48917333 | |
| | | TA | | CTTA | | |
| WP_1006458 | 172 | CAAGTATCGATANNN | 779 | CATGTATAGATATA | chr16:48917302- | 4 |
| 80.1 | | NNNNNTATCGATACT | | TATGCATATAGATA | 48917333 | |
| | | TA | | CTTA | | |
| WP_1006537 | 173 | CAAGTATCGATANNN | 780 | CATGTATAGATATA | chr16:48917302- | 4 |
| 72.1 | | NNNNNTATCGATACT | | TATGCATATAGATA | 48917333 | |
| | | TA | | CTTA | | |
| WP_0419154 | 174 | CAAGTATCGATANNN | 781 | CATGTATAGATATA | chr16:48917302- | 4 |
| 08.1 | | NNNNNTATCGATACT | | TATGCATATAGATA | 48917333 | |
| | | TA | | CTTA | | |
| WP_1295040 | 175 | CAAGTATCGATANNN | 782 | CATGTATAGATATA | chr16:48917302- | 4 |
| 75.1 | | NNNNNTATCGATACT | | TATGCATATAGATA | 48917333 | |
| | | TA | | CTTA | | |
| WP_0946984 | 176 | CAAGTATCGATANNN | 783 | CATGTATAGATATA | chr16:48917302- | 4 |
| 59.1 | | NNNNNTATCGATACT | | TATGCATATAGATA | 48917333 | |
| | | TA | | CTTA | | |
| WP_1068867 | 177 | CAAGTATCGATANNN | 784 | CATGTATAGATATA | chr16:48917302- | 4 |
| 83.1 | | NNNNNTATCGATACT | | TATGCATATAGATA | 48917333 | |
| | | TA | | CTTA | | |
| WP_0177853 | 178 | CAAGTATCGATANNN | 785 | CATGTATAGATATA | chr16:48917302- | 4 |
| 58.1 | | NNNNNTATCGATACT | | TATGCATATAGATA | 48917333 | |
| | | TA | | CTTA | | |
| WP_1008583 | 179 | CAAGTATCGATANNN | 786 | CATGTATAGATATA | chr16:48917302- | 4 |
| 03.1 | | NNNNNTATCGATACT | | TATGCATATAGATA | 48917333 | |
| | | TA | | CTTA | | |
| WP_1232461 | 180 | CAAGTATCGATANNN | 787 | CATGTATAGATATA | chr16:48917302- | 4 |
| 39.1 | | NNNNNTATCGATACT | | TATGCATATAGATA | 48917333 | |
| | | TA | | CTTA | | |
| WP_0431627 | 181 | CAAGTATCGATANNN | 788 | CATGTATAGATATA | chr16:48917302- | 4 |
| 17.1 | | NNNNNTATCGATACT | | TATGCATATAGATA | 48917333 | |
| | | TA | | CTTA | | |
| WP_1242494 | 182 | CAAGTATCGATANNN | 789 | CATGTATAGATATA | chr16:48917302- | 4 |
| 52.1 | | NNNNNTATCGATACT | | TATGCATATAGATA | 48917333 | |
| | | TA | | CTTA | | |
| WP_0961195 | 183 | CAAGTATCGATANNN | 790 | CATGTATAGATATA | chr16:48917302- | 4 |
| 02.1 | | NNNNNTATCGATACT | | TATGCATATAGATA | 48917333 | |
| | | TA | | CTTA | | |
| WP_0842026 | 184 | CAAGTATCGATANNN | 791 | CATGTATAGATATA | chr16:48917302- | 4 |
| 52.1 | | NNNNNTATCGATACT | | TATGCATATAGATA | 48917333 | |
| | | TA | | CTTA | | |
| WP_0392158 | 185 | CAAGTATCGATANNN | 792 | CATGTATAGATATA | chr16:48917302- | 4 |
| 13.1 | | NNNNNTATCGATACT | | TATGCATATAGATA | 48917333 | |
| | | TA | | CTTA | | |
| WP_1242514 | 186 | CAAGTATCGATANNN | 793 | CATGTATAGATATA | chr16:48917302- | 4 |
| 91.1 | | NNNNNTATCGATACT | | TATGCATATAGATA | 48917333 | |
| | | TA | | CTTA | | |
| WP_0252017 | 187 | CAAGTATCGATANNN | 794 | CATGTATAGATATA | chr16:48917302- | 4 |
| 27.1 | | NNNNNTATCGATACT | | TATGCATATAGATA | 48917333 | |
| | | TA | | CTTA | | |
| WP_1257299 | 188 | CAAGTATCGATANNN | 795 | CATGTATAGATATA | chr16:48917302- | 4 |
| 07.1 | | NNNNNTATCGATACT | | TATGCATATAGATA | 48917333 | |
| | | TA | | CTTA | | |
| WP_0431229 | 189 | CAAGTATCGATANNN | 796 | CATGTATAGATATA | chr16:48917302- | 4 |
| 83.1 | | NNNNNTATCGATACT | | TATGCATATAGATA | 48917333 | |
| | | TA | | CTTA | | |
| WP_0733502 | 190 | CAAGTATCGATANNN | 797 | CATGTATAGATATA | chr16:48917302- | 4 |
| 84.1 | | NNNNNTATCGATACT | | TATGCATATAGATA | 48917333 | |
| | | TA | | CTTA | | |
| WP_1034707 | 191 | CAAGTATCGATANNN | 798 | CATGTATAGATATA | chr16:48917302- | 4 |
| 61.1 | | NNNNNTATCGATACT | | TATGCATATAGATA | 48917333 | |
| | | TA | | CTTA | | |
| WP_0431348 | 192 | CAAGTATCGATANNN | 799 | CATGTATAGATATA | chr16:48917302- | 4 |
| 01.1 | | NNNNNTATCGATACT | | TATGCATATAGATA | 48917333 | |
| | | TA | | CTTA | | |
| WP_1256066 | 193 | CAAGTATCGATANNN | 800 | CATGTATAGATATA | chr16:48917302- | 4 |
| 95.1 | | NNNNNTATCGATACT | | TATGCATATAGATA | 48917333 | |
| | | TA | | CTTA | | |
| WP_0989840 | 194 | CAAGTATCGATANNN | 801 | CATGTATAGATATA | chr16:48917302- | 4 |
| 54.1 | | NNNNNTATCGATACT | | TATGCATATAGATA | 48917333 | |
| | | TA | | CTTA | | |
| WP_1011491 | 195 | CAAGTATCGATANNN | 802 | CATGTATAGATATA | chr16:48917302- | 4 |
| 34.1 | | NNNNNTATCGATACT | | TATGCATATAGATA | 48917333 | |
| | | TA | | CTTA | | |
| WP_0877557 | 196 | CAAGTATCGATANNN | 803 | CATGTATAGATATA | chr16:48917302- | 4 |
| 18.1 | | NNNNNTATCGATACT | | TATGCATATAGATA | 48917333 | |
| | | TA | | CTTA | | |
| WP_0808913 | 197 | CAAGTATCGATANNN | 804 | CATGTATAGATATA | chr16:48917302- | 4 |
| 34.1 | | NNNNNTATCGATACT | | TATGCATATAGATA | 48917333 | |
| | | TA | | CTTA | | |
| WP_1115878 | 198 | CAAGTATCGATANNN | 805 | CATGTATAGATATA | chr16:48917302- | 4 |
| 63.1 | | NNNNNTATCGATACT | | TATGCATATAGATA | 48917333 | |
| | | TA | | CTTA | | |
| ABO90113.1 | 199 | CAAGTATCGATANNN | 806 | CATGTATAGATATA | chr16:48917302- | 4 |
| | | NNNNNTATCGATACT | | TATGCATATAGATA | 48917333 | |
| | | TA | | CTTA | | |
| WP_1032431 | 200 | CAAGTATCGATANNN | 807 | CATGTATAGATATA | chr16:48917302- | 4 |
| 21.1 | | NNNNNTATCGATACT | | TATGCATATAGATA | 48917333 | |
| | | TA | | CTTA | | |
| WP_1242438 | 201 | CAAGTATCGATANNN | 808 | CATGTATAGATATA | chr16:48917302- | 4 |
| 12.1 | | NNNNNTATCGATACT | | TATGCATATAGATA | 48917333 | |
| | | TA | | CTTA | | |
| WP_0428784 | 202 | CAAGTATCGATANNN | 809 | CATGTATAGATATA | chr16:48917302- | 4 |
| 86.1 | | NNNNNTATCGATACT | | TATGCATATAGATA | 48917333 | |
| | | TA | | CTTA | | |
| WP_0053470 | 203 | CAAGTATCGATANNN | 810 | CATGTATAGATATA | chr16:48917302- | 4 |
| 25.1 | | NNNNNTATCGATACT | | TATGCATATAGATA | 48917333 | |
| | | TA | | CTTA | | |
| WP_0420629 | 204 | CAAGTATCGATANNN | 811 | CATGTATAGATATA | chr16:48917302- | 4 |
| 22.1 | | NNNNNTATCGATACT | | TATGCATATAGATA | 48917333 | |
| | | TA | | CTTA | | |
| WP_0420550 | 205 | CAAGTATCGATANNN | 812 | CATGTATAGATATA | chr16:48917302- | 4 |
| 87.1 | | NNNNNTATCGATACT | | TATGCATATAGATA | 48917333 | |
| | | TA | | CTTA | | |
| WP_0751136 | 206 | CAAGTATCGATANNN | 813 | CATGTATAGATATA | chr16:48917302- | 4 |
| 48.1 | | NNNNNTATCGATACT | | TATGCATATAGATA | 48917333 | |
| | | TA | | CTTA | | |
| WP_0695268 | 207 | CAAGTATCGATANNN | 814 | CATGTATAGATATA | chr16:48917302- | 4 |
| 84.1 | | NNNNNTATCGATACT | | TATGCATATAGATA | 48917333 | |
| | | TA | | CTTA | | |
| WP_0505478 | 208 | CAAGTATCGATANNN | 815 | CATGTATAGATATA | chr16:48917302- | 4 |
| 38.1 | | NNNNNTATCGATACT | | TATGCATATAGATA | 48917333 | |
| | | TA | | CTTA | | |
| WP_0764917 | 209 | CAAGTATCGATANNN | 816 | CATGTATAGATATA | chr16:48917302- | 4 |
| 68.1 | | NNNNNTATCGATACT | | TATGCATATAGATA | 48917333 | |
| | | TA | | CTTA | | |
| SQH59660.1 | 210 | CAAGTATCGATANNN | 817 | CATGTATAGATATA | chr16:48917302- | 4 |
| | | NNNNNTATCGATACT | | TATGCATATAGATA | 48917333 | |
| | | TA | | CTTA | | |
| WP_0719101 | 211 | CAAGTATCGATANNN | 818 | CATGTATAGATATA | chr16:48917302- | 4 |
| 68.1 | | NNNNNTATCGATACT | | TATGCATATAGATA | 48917333 | |
| | | TA | | CTTA | | |
| OFC44115.1 | 212 | CAAGTATCGATANNN | 819 | CATGTATAGATATA | chr16:48917302- | 4 |
| | | NNNNNTATCGATACT | | TATGCATATAGATA | 48917333 | |
| | | TA | | CTTA | | |
| AHV35191.2 | 213 | CAAGTATCGATANNN | 820 | CATGTATAGATATA | chr16:48917302- | 4 |
| | | NNNNNTATCGATACT | | TATGCATATAGATA | 48917333 | |
| | | TA | | CTTA | | |
| EKB28734.1 | 214 | CAAGTATCGATANNN | 821 | CATGTATAGATATA | chr16:48917302- | 4 |
| | | NNNNNTATCGATACT | | TATGCATATAGATA | 48917333 | |
| | | TA | | CTTA | | |
| OCA67852.1 | 215 | CAAGTATCGATANNN | 822 | CATGTATAGATATA | chr16:48917302- | 4 |
| | | NNNNNTATCGATACT | | TATGCATATAGATA | 48917333 | |
| | | TA | | CTTA | | |
| KMK90327.1 | 216 | CAAGTATCGATANNN | 823 | CATGTATAGATATA | chr16:48917302- | 4 |
| | | NNNNNTATCGATACT | | TATGCATATAGATA | 48917333 | |
| | | TA | | CTTA | | |
| APJ17493.1 | 217 | CAAGTATCGATANNN | 824 | CATGTATAGATATA | chr16:48917302- | 4 |
| | | NNNNNTATCGATACT | | TATGCATATAGATA | 48917333 | |
| | | TA | | CTTA | | |
| WP_0591677 | 218 | CAAGTATCGATANNN | 825 | CATGTATAGATATA | chr16:48917302- | 4 |
| 96.1 | | NNNNNTATCGATACT | | TATGCATATAGATA | 48917333 | |
| | | TA | | CTTA | | |
| PKD25755.1 | 219 | CAAGTATCGATANNN | 826 | CATGTATAGATATA | chr16:48917302- | 4 |
| | | NNNNNTATCGATACT | | TATGCATATAGATA | 48917333 | |
| | | TA | | CTTA | | |
| WP_0521011 | 220 | CAAGTATCGATANNN | 827 | CATGTATAGATATA | chr16:48917302- | 4 |
| 92.1 | | NNNNNTATCGATACT | | TATGCATATAGATA | 48917333 | |
| | | TA | | CTTA | | |
| WP_0521590 | 221 | CAAGTATCGATANNN | 828 | CATGTATAGATATA | chr16:48917302- | 4 |
| 26.1 | | NNNNNTATCGATACT | | TATGCATATAGATA | 48917333 | |
| | | TA | | CTTA | | |
| AGM44110.1 | 222 | CAAGTATCGATANNN | 829 | CATGTATAGATATA | chr16:48917302- | 4 |
| | | NNNNNTATCGATACT | | TATGCATATAGATA | 48917333 | |
| | | TA | | CTTA | | |
| WP_0426547 | 223 | CAAGTATCGATANNN | 830 | CATGTATAGATATA | chr16:48917302- | 4 |
| 58.1 | | NNNNNTATCGATACT | | TATGCATATAGATA | 48917333 | |
| | | TA | | CTTA | | |
| WP_0426383 | 224 | CAAGTATCGATANNN | 831 | CATGTATAGATATA | chr16:48917302- | 4 |
| 08.1 | | NNNNNTATCGATACT | | TATGCATATAGATA | 48917333 | |
| | | TA | | CTTA | | |
| WP_0464007 | 225 | CAAGTATCGATANNN | 832 | CATGTATAGATATA | chr16:48917302- | 4 |
| 08.1 | | NNNNNTATCGATACT | | TATGCATATAGATA | 48917333 | |
| | | TA | | CTTA | | |
| ARW82171.1 | 226 | CAAGTATCGATANNN | 833 | CATGTATAGATATA | chr16:48917302- | 4 |
| | | NNNNNTATCGATACT | | TATGCATATAGATA | 48917333 | |
| | | TA | | CTTA | | |
| WP_0424673 | 227 | CAAGTATCGATANNN | 834 | CATGTATAGATATA | chr16:48917302- | 4 |
| 53.1 | | NNNNNTATCGATACT | | TATGCATATAGATA | 48917333 | |
| | | TA | | CTTA | | |
| WP_0511637 | 228 | CAAGTATCGATANNN | 835 | CATGTATAGATATA | chr16:48917302- | 4 |
| 65.1 | | NNNNNTATCGATACT | | TATGCATATAGATA | 48917333 | |
| | | TA | | CTTA | | |
| KOG94732.1 | 229 | CAAGTATCGATANNN | 836 | CATGTATAGATATA | chr16:48917302- | 4 |
| | | NNNNNTATCGATACT | | TATGCATATAGATA | 48917333 | |
| | | TA | | CTTA | | |
| EKB19089.1 | 230 | CAAGTATCGATANNN | 837 | CATGTATAGATATA | chr16:48917302- | 4 |
| | | NNNNNTATCGATACT | | TATGCATATAGATA | 48917333 | |
| | | TA | | CTTA | | |
| EKB18370.1 | 231 | CAAGTATCGATANNN | 838 | CATGTATAGATATA | chr16:48917302- | 4 |
| | | NNNNNTATCGATACT | | TATGCATATAGATA | 48917333 | |
| | | TA | | CTTA | | |
| WP_0820325 | 232 | CAAGTATCGATANNN | 839 | CATGTATAGATATA | chr16:48917302- | 4 |
| 88.1 | | NNNNNTATCGATACT | | TATGCATATAGATA | 48917333 | |
| | | TA | | CTTA | | |
| AEB50024.1 | 233 | CAAGTATCGATANNN | 840 | CATGTATAGATATA | chr16:48917302- | 4 |
| | | NNNNNTATCGATACT | | TATGCATATAGATA | 48917333 | |
| | | TA | | CTTA | | |
| EQC05143.1 | 234 | CAAGTATCGATANNN | 841 | CATGTATAGATATA | chr16:48917302- | 4 |
| | | NNNNNTATCGATACT | | TATGCATATAGATA | 48917333 | |
| | | TA | | CTTA | | |
| RAJ07841.1 | 235 | CAAGTATCGATANNN | 842 | CATGTATAGATATA | chr16:48917302- | 4 |
| | | NNNNNTATCGATACT | | TATGCATATAGATA | 48917333 | |
| | | TA | | CTTA | | |
| WP_1137395 | 236 | CAAGTATTGATANNN | 843 | CATGTATAGATATA | chr16:48917302- | 4 |
| 60.1 | | NNNNNTATCGATACT | | TATGCATATAGATA | 48917333 | |
| | | TA | | CTTA | | |
| WP_0615205 | 237 | CCAGCCCCTACANNN | 844 | CCAGCCCCTCCAGA | chr16:66346513- | 6 |
| 10.1 | | NNNNNTGTAGGGGC | | GAGCCCTGATGGG | 66346544 | |
| | | TGT | | GCTGT | | |
| WP_0069513 | 238 | TGCAAATATTACANN | 845 | TGCAAATTTTACAA | chr16:66394313- | 7 |
| 58.1 | | NNNNNNNTGTAATTT | | CCTTTACTTTTAATT | 66394347 | |
| | | TTGCA | | TTTCCA | | |
| WP_0400655 | 239 | TAAGTATCGATANNN | 846 | TAACTATCAATAGTT | chr17:10781706- | 6 |
| 15.1 | | NNNNNTATCGATACT | | ACTATTATCGATAG | 10781737 | |
| | | TG | | TTG | | |
| WP_1015315 | 240 | TAAGTATCGATANNN | 847 | TAACTATCAATAGTT | chr17:10781706- | 6 |
| 73.1 | | NNNNNTATCGATACT | | ACTATTATCGATAG | 10781737 | |
| | | TG | | TTG | | |
| WP_0412350 | 241 | TAAGTATCGATANNN | 848 | TAACTATCAATAGTT | chr17:10781706- | 6 |
| 50.1 | | NNNNNTATCGATACT | | ACTATTATCGATAG | 10781737 | |
| | | TG | | TTG | | |
| WP_0820386 | 242 | TAAGTATCGATANNN | 849 | TAACTATCAATAGTT | chr17:10781706- | 6 |
| 47.1 | | NNNNNTATCGATACT | | ACTATTATCGATAG | 10781737 | |
| | | TG | | TTG | | |
| WP_1085882 | 243 | TAAGTATCGATANNN | 850 | TAACTATCAATAGTT | chr17:10781706- | 6 |
| 31.1 | | NNNNNTATCGATACT | | ACTATTATCGATAG | 10781737 | |
| | | TG | | TTG | | |
| KRV94096.1 | 244 | TAAGTATCGATANNN | 851 | TAACTATCAATAGTT | chr17:10781706- | 6 |
| | | NNNNNTATCGATACT | | ACTATTATCGATAG | 10781737 | |
| | | TG | | TTG | | |
| WP_0993594 | 245 | TAAGTATCGATANNN | 852 | TAACTATCAATAGTT | chr17:10781706- | 6 |
| 35.1 | | NNNNNTATCGATACT | | ACTATTATCGATAG | 10781737 | |
| | | TG | | TTG | | |
| WP_1204142 | 246 | TAAGTATCGATANNN | 853 | TAACTATCAATAGTT | chr17:10781706- | 6 |
| 55.1 | | NNNNNTATCGATACT | | ACTATTATCGATAG | 10781737 | |
| | | TG | | TTG | | |
| WP_1013472 | 247 | TAAGTATCGATANNN | 854 | TAACTATCAATAGTT | chr17:10781706- | 6 |
| 86.1 | | NNNNNTATCGATACT | | ACTATTATCGATAG | 10781737 | |
| | | TG | | TTG | | |
| WP_1068436 | 248 | TAAGTATCGATANNN | 855 | TAACTATCAATAGTT | chr17:10781706- | 6 |
| 96.1 | | NNNNNTATCGATACT | | ACTATTATCGATAG | 10781737 | |
| | | TG | | TTG | | |
| WP_1242429 | 249 | TAAGTATCGATANNN | 856 | TAACTATCAATAGTT | chr17:10781706- | 6 |
| 06.1 | | NNNNNTATCGATACT | | ACTATTATCGATAG | 10781737 | |
| | | TG | | TTG | | |
| WP_0412027 | 250 | TAAGTATCGATANNN | 857 | TAACTATCAATAGTT | chr17:10781706- | 6 |
| 00.1 | | NNNNNTATCGATACT | | ACTATTATCGATAG | 10781737 | |
| | | TG | | TTG | | |
| WP_1231730 | 251 | TAAGTATCGATANNN | 858 | TAACTATCAATAGTT | chr17:10781706- | 6 |
| 50.1 | | NNNNNTATCGATACT | | ACTATTATCGATAG | 10781737 | |
| | | TG | | TTG | | |
| WP_1076829 | 252 | TAAGTATCGATANNN | 859 | TAACTATCAATAGTT | chr17:10781706- | 6 |
| 50.1 | | NNNNNTATCGATACT | | ACTATTATCGATAG | 10781737 | |
| | | TG | | TTG | | |
| WP_1288215 | 253 | TAAGTATCGATANNN | 860 | TAACTATCAATAGTT | chr17:10781706- | 6 |
| 47.1 | | NNNNNTATCGATACT | | ACTATTATCGATAG | 10781737 | |
| | | TG | | TTG | | |
| WP_0821806 | 254 | TAAGTATCGATANNN | 861 | TAACTATCAATAGTT | chr17:10781706- | 6 |
| 60.1 | | NNNNNTATCGATACT | | ACTATTATCGATAG | 10781737 | |
| | | TG | | TTG | | |
| WP_0820299 | 255 | TAAGTATCGATANNN | 862 | TAACTATCAATAGTT | chr17:10781706- | 6 |
| 42.1 | | NNNNNTATCGATACT | | ACTATTATCGATAG | 10781737 | |
| | | TG | | TTG | | |
| WP_0810132 | 256 | TAAGTATCGATANNN | 863 | TAACTATCAATAGTT | chr17:10781706- | 6 |
| 37.1 | | NNNNNTATCGATACT | | ACTATTATCGATAG | 10781737 | |
| | | TG | | TTG | | |
| WP_0249417 | 257 | TAAGTATCGATANNN | 864 | TAACTATCAATAGTT | chr17:10781706- | 6 |
| 85.1 | | NNNNNTATCGATACT | | ACTATTATCGATAG | 10781737 | |
| | | TG | | TTG | | |
| WP_0650175 | 258 | TAAGTATCGATANNN | 865 | TAACTATCAATAGTT | chr17:10781706- | 6 |
| 96.1 | | NNNNNTATCGATACT | | ACTATTATCGATAG | 10781737 | |
| | | TG | | TTG | | |
| WP_0428890 | 259 | TAAGTATCGATANNN | 866 | TAACTATCAATAGTT | chr17:10781706- | 6 |
| 28.1 | | NNNNNTATCGATACT | | ACTATTATCGATAG | 10781737 | |
| | | TG | | TTG | | |
| WP_1119106 | 260 | TAAGTATCGATANNN | 867 | TAACTATCAATAGTT | chr17:10781706- | 6 |
| 13.1 | | NNNNNTATCGATACT | | ACTATTATCGATAG | 10781737 | |
| | | TG | | TTG | | |
| WP_1268818 | 261 | TAAGTATCGATANNN | 868 | TAACTATCAATAGTT | chr17:10781706- | 6 |
| 46.1 | | NNNNNTATCGATACT | | ACTATTATCGATAG | 10781737 | |
| | | TG | | TTG | | |
| WP_0177790 | 262 | TAAGTATCGATANNN | 869 | TAACTATCAATAGTT | chr17:10781706- | 6 |
| 21.1 | | NNNNNTATCGATACT | | ACTATTATCGATAG | 10781737 | |
| | | TG | | TTG | | |
| WP_0807688 | 263 | TAAGTATCGATANNN | 870 | TAACTATCAATAGTT | chr17:10781706- | 6 |
| 65.1 | | NNNNNTATCGATACT | | ACTATTATCGATAG | 10781737 | |
| | | TG | | TTG | | |
| WP_0809731 | 264 | TAAGTATCGATANNN | 871 | TAACTATCAATAGTT | chr17:10781706- | 6 |
| 38.1 | | NNNNNTATCGATACT | | ACTATTATCGATAG | 10781737 | |
| | | TG | | TTG | | |
| WP_0249447 | 265 | TAAGTATCGATANNN | 872 | TAACTATCAATAGTT | chr17:10781706- | 6 |
| 68.1 | | NNNNNTATCGATACT | | ACTATTATCGATAG | 10781737 | |
| | | TG | | TTG | | |
| WP_1065525 | 266 | TAAGTATCGATANNN | 873 | TAACTATCAATAGTT | chr17:10781706- | 6 |
| 88.1 | | NNNNNTATCGATACT | | ACTATTATCGATAG | 10781737 | |
| | | TG | | TTG | | |
| WP_1139950 | 267 | TAAGTATCGATANNN | 874 | TAACTATCAATAGTT | chr17:10781706- | 6 |
| 02.1 | | NNNNNTATCGATACT | | ACTATTATCGATAG | 10781737 | |
| | | TG | | TTG | | |
| WP_1306323 | 268 | TAAGTATCGATANNN | 875 | TAACTATCAATAGTT | chr17:10781706- | 6 |
| 56.1 | | NNNNNTATCGATACT | | ACTATTATCGATAG | 10781737 | |
| | | TG | | TTG | | |
| WP_1137216 | 269 | TAAGTATCGATANNN | 876 | TAACTATCAATAGTT | chr17:10781706- | 6 |
| 56.1 | | NNNNNTATCGATACT | | ACTATTATCGATAG | 10781737 | |
| | | TG | | TTG | | |
| WP_0888462 | 270 | TAAGTATCGATANNN | 877 | TAACTATCAATAGTT | chr17:10781706- | 6 |
| 17.1 | | NNNNNTATCGATACT | | ACTATTATCGATAG | 10781737 | |
| | | TG | | TTG | | |
| WP_0763607 | 271 | TAAGTATCGATANNN | 878 | TAACTATCAATAGTT | chr17:10781706- | 6 |
| 55.1 | | NNNNNTATCGATACT | | ACTATTATCGATAG | 10781737 | |
| | | TG | | TTG | | |
| WP_1317306 | 272 | TAAGTATCGATANNN | 879 | TAACTATCAATAGTT | chr17:10781706- | 6 |
| 94.1 | | NNNNNTATCGATACT | | ACTATTATCGATAG | 10781737 | |
| | | TG | | TTG | | |
| WP_1032439 | 273 | TAAGTATCGATANNN | 880 | TAACTATCAATAGTT | chr17:10781706- | 6 |
| 80.1 | | NNNNNTATCGATACT | | ACTATTATCGATAG | 10781737 | |
| | | TG | | TTG | | |
| WP_0813046 | 274 | TAAGTATCGATANNN | 881 | TAACTATCAATAGTT | chr17:10781706- | 6 |
| 08.1 | | NNNNNTATCGATACT | | ACTATTATCGATAG | 10781737 | |
| | | TG | | TTG | | |
| WP_1188812 | 275 | TAAGTATCGATANNN | 882 | TAACTATCAATAGTT | chr17:10781706- | 6 |
| 29.1 | | NNNNNTATCGATACT | | ACTATTATCGATAG | 10781737 | |
| | | TG | | TTG | | |
| WP_0293008 | 276 | TAAGTATCGATANNN | 883 | TAACTATCAATAGTT | chr17:10781706- | 6 |
| 82.1 | | NNNNNTATCGATACT | | ACTATTATCGATAG | 10781737 | |
| | | TG | | TTG | | |
| WP_1029887 | 277 | TAAGTATCGATANNN | 884 | TAACTATCAATAGTT | chr17:10781706- | 6 |
| 85.1 | | NNNNNTATCGATACT | | ACTATTATCGATAG | 10781737 | |
| | | TG | | TTG | | |
| WP_0345236 | 278 | TAAGTATCGATANNN | 885 | TAACTATCAATAGTT | chr17:10781706- | 6 |
| 32.1 | | NNNNNTATCGATACT | | ACTATTATCGATAG | 10781737 | |
| | | TG | | TTG | | |
| WP_0117061 | 279 | TAAGTATCGATANNN | 886 | TAACTATCAATAGTT | chr17:10781706- | 6 |
| 13.1 | | NNNNNTATCGATACT | | ACTATTATCGATAG | 10781737 | |
| | | TG | | TTG | | |
| WP_0810861 | 280 | TAAGTATCGATANNN | 887 | TAACTATCAATAGTT | chr17:10781706- | 6 |
| 91.1 | | NNNNNTATCGATACT | | ACTATTATCGATAG | 10781737 | |
| | | TG | | TTG | | |
| WP_0457898 | 281 | TAAGTATCGATANNN | 888 | TAACTATCAATAGTT | chr17:10781706- | 6 |
| 55.1 | | NNNNNTATCGATACT | | ACTATTATCGATAG | 10781737 | |
| | | TG | | TTG | | |
| WP_1016174 | 282 | TAAGTATCGATANNN | 889 | TAACTATCAATAGTT | chr17:10781706- | 6 |
| 48.1 | | NNNNNTATCGATACT | | ACTATTATCGATAG | 10781737 | |
| | | TG | | TTG | | |
| WP_0999932 | 283 | TAAGTATCGATANNN | 890 | TAACTATCAATAGTT | chr17:10781706- | 6 |
| 15.1 | | NNNNNTATCGATACT | | ACTATTATCGATAG | 10781737 | |
| | | TG | | TTG | | |
| WP_1044559 | 284 | TAAGTATCGATANNN | 891 | TAACTATCAATAGTT | chr17:10781706- | 6 |
| 33.1 | | NNNNNTATCGATACT | | ACTATTATCGATAG | 10781737 | |
| | | TG | | TTG | | |
| WP_0428638 | 285 | TAAGTATCGATANNN | 892 | TAACTATCAATAGTT | chr17:10781706- | 6 |
| 72.1 | | NNNNNTATCGATACT | | ACTATTATCGATAG | 10781737 | |
| | | TG | | TTG | | |
| WP_0412057 | 286 | TAAGTATCGATANNN | 893 | TAACTATCAATAGTT | chr17:10781706- | 6 |
| 82.1 | | NNNNNTATCGATACT | | ACTATTATCGATAG | 10781737 | |
| | | TG | | TTG | | |
| WP_0431527 | 287 | TAAGTATCGATANNN | 894 | TAACTATCAATAGTT | chr17:10781706- | 6 |
| 10.1 | | NNNNNTATCGATACT | | ACTATTATCGATAG | 10781737 | |
| | | TG | | TTG | | |
| WP_1038589 | 288 | TAAGTATCGATANNN | 895 | TAACTATCAATAGTT | chr17:10781706- | 6 |
| 36.1 | | NNNNNTATCGATACT | | ACTATTATCGATAG | 10781737 | |
| | | TG | | TTG | | |
| WP_1242393 | 289 | TAAGTATCGATANNN | 896 | TAACTATCAATAGTT | chr17:10781706- | 6 |
| 32.1 | | NNNNNTATCGATACT | | ACTATTATCGATAG | 10781737 | |
| | | TG | | TTG | | |
| WP_1032618 | 290 | TAAGTATCGATANNN | 897 | TAACTATCAATAGTT | chr17:10781706- | 6 |
| 85.1 | | NNNNNTATCGATACT | | ACTATTATCGATAG | 10781737 | |
| | | TG | | TTG | | |
| WP_1032601 | 291 | TAAGTATCGATANNN | 898 | TAACTATCAATAGTT | chr17:10781706- | 6 |
| 30.1 | | NNNNNTATCGATACT | | ACTATTATCGATAG | 10781737 | |
| | | TG | | TTG | | |
| WP_1118092 | 292 | TAAGTATCGATANNN | 899 | TAACTATCAATAGTT | chr17:10781706- | 6 |
| 97.1 | | NNNNNTATCGATACT | | ACTATTATCGATAG | 10781737 | |
| | | TG | | TTG | | |
| WP_0813318 | 293 | TAAGTATCGATANNN | 900 | TAACTATCAATAGTT | chr17:10781706- | 6 |
| 71.1 | | NNNNNTATCGATACT | | ACTATTATCGATAG | 10781737 | |
| | | TG | | TTG | | |
| WP_0412151 | 294 | TAAGTATCGATANNN | 901 | TAACTATCAATAGTT | chr17:10781706- | 6 |
| 62.1 | | NNNNNTATCGATACT | | ACTATTATCGATAG | 10781737 | |
| | | TG | | TTG | | |
| WP_1266233 | 295 | TAAGTATCGATANNN | 902 | TAACTATCAATAGTT | chr17:10781706- | 6 |
| 23.1 | | NNNNNTATCGATACT | | ACTATTATCGATAG | 10781737 | |
| | | TG | | TTG | | |
| WP_0504900 | 296 | TAAGTATCGATANNN | 903 | TAACTATCAATAGTT | chr17:10781706- | 6 |
| 04.1 | | NNNNNTATCGATACT | | ACTATTATCGATAG | 10781737 | |
| | | TG | | TTG | | |
| WP_0420309 | 297 | TAAGTATCGATANNN | 904 | TAACTATCAATAGTT | chr17:10781706- | 6 |
| 57.1 | | NNNNNTATCGATACT | | ACTATTATCGATAG | 10781737 | |
| | | TG | | TTG | | |
| WP_0420832 | 298 | TAAGTATCGATANNN | 905 | TAACTATCAATAGTT | chr17:10781706- | 6 |
| 30.1 | | NNNNNTATCGATACT | | ACTATTATCGATAG | 10781737 | |
| | | TG | | TTG | | |
| WP_0643400 | 299 | TAAGTATCGATANNN | 906 | TAACTATCAATAGTT | chr17:10781706- | 6 |
| 28.1 | | NNNNNTATCGATACT | | ACTATTATCGATAG | 10781737 | |
| | | TG | | TTG | | |
| WP_0419807 | 300 | TAAGTATCGATANNN | 907 | TAACTATCAATAGTT | chr17:10781706- | 6 |
| 81.1 | | NNNNNTATCGATACT | | ACTATTATCGATAG | 10781737 | |
| | | TG | | TTG | | |
| WP_0426558 | 301 | TAAGTATCGATANNN | 908 | TAACTATCAATAGTT | chr17:10781706- | 6 |
| 14.1 | | NNNNNTATCGATACT | | ACTATTATCGATAG | 10781737 | |
| | | TG | | TTG | | |
| WP_0524471 | 302 | TAAGTATCGATANNN | 909 | TAACTATCAATAGTT | chr17:10781706- | 6 |
| 16.1 | | NNNNNTATCGATACT | | ACTATTATCGATAG | 10781737 | |
| | | TG | | TTG | | |
| PHS84353.1 | 303 | TAAGTATCGATANNN | 910 | TAACTATCAATAGTT | chr17:10781706- | 6 |
| | | NNNNNTATCGATACT | | ACTATTATCGATAG | 10781737 | |
| | | TG | | TTG | | |
| WP_0420378 | 304 | TAAGTATCGATANNN | 911 | TAACTATCAATAGTT | chr17:10781706- | 6 |
| 44.1 | | NNNNNTATCGATACT | | ACTATTATCGATAG | 10781737 | |
| | | TG | | TTG | | |
| OEG05223.1 | 305 | TAAGTATCGATANNN | 912 | TAACTATCAATAGTT | chr17:10781706- | 6 |
| | | NNNNNTATCGATACT | | ACTATTATCGATAG | 10781737 | |
| | | TG | | TTG | | |
| KLV47629.1 | 306 | TAAGTATCGATANNN | 913 | TAACTATCAATAGTT | chr17:10781706- | 6 |
| | | NNNNNTATCGATACT | | ACTATTATCGATAG | 10781737 | |
| | | TG | | TTG | | |
| AXV34415.1 | 307 | TAAGTATCGATANNN | 914 | TAACTATCAATAGTT | chr17:10781706- | 6 |
| | | NNNNNTATCGATACT | | ACTATTATCGATAG | 10781737 | |
| | | TG | | TTG | | |
| OCA59831.1 | 308 | TAAGTATCGATANNN | 915 | TAACTATCAATAGTT | chr17:10781706- | 6 |
| | | NNNNNTATCGATACT | | ACTATTATCGATAG | 10781737 | |
| | | TG | | TTG | | |
| SUU28072.1 | 309 | TAAGTATCGATANNN | 916 | TAACTATCAATAGTT | chr17:10781706- | 6 |
| | | NNNNNTATCGATACT | | ACTATTATCGATAG | 10781737 | |
| | | TG | | TTG | | |
| KWR69035.1 | 310 | TAAGTATCGATANNN | 917 | TAACTATCAATAGTT | chr17:10781706- | 6 |
| | | NNNNNTATCGATACT | | ACTATTATCGATAG | 10781737 | |
| | | TG | | TTG | | |
| WP_0524491 | 311 | TAAGTATCGATANNN | 918 | TAACTATCAATAGTT | chr17:10781706- | 6 |
| 73.1 | | NNNNNTATCGATACT | | ACTATTATCGATAG | 10781737 | |
| | | TG | | TTG | | |
| WP_0507171 | 312 | TAAGTATCGATANNN | 919 | TAACTATCAATAGTT | chr17:10781706- | 6 |
| 34.1 | | NNNNNTATCGATACT | | ACTATTATCGATAG | 10781737 | |
| | | TG | | TTG | | |
| OJW69670.1 | 313 | TAAGTATCGATANNN | 920 | TAACTATCAATAGTT | chr17:10781706- | 6 |
| | | NNNNNTATCGATACT | | ACTATTATCGATAG | 10781737 | |
| | | TG | | TTG | | |
| VEG96551.1 | 314 | TAAGTATCGATANNN | 921 | TAACTATCAATAGTT | chr17:10781706- | 6 |
| | | NNNNNTATCGATACT | | ACTATTATCGATAG | 10781737 | |
| | | TG | | TTG | | |
| WP_0842022 | 315 | TAAGTATCGATANNN | 922 | TAACTATCAATAGTT | chr17:10781706- | 6 |
| 79.1 | | NNNNNTATCGATACT | | ACTATTATCGATAG | 10781737 | |
| | | TG | | TTG | | |
| WP_0807412 | 316 | TAAGTATCGATANNN | 923 | TAACTATCAATAGTT | chr17:10781706- | 6 |
| 49.1 | | NNNNNTATCGATACT | | ACTATTATCGATAG | 10781737 | |
| | | TG | | TTG | | |
| EKB22195.1 | 317 | TAAGTATCGATANNN | 924 | TAACTATCAATAGTT | chr17:10781706- | 6 |
| | | NNNNNTATCGATACT | | ACTATTATCGATAG | 10781737 | |
| | | TG | | TTG | | |
| WP_0810429 | 318 | TAAGTATCGATANNN | 925 | TAACTATCAATAGTT | chr17:10781706- | 6 |
| 09.1 | | NNNNNTATCGATACT | | ACTATTATCGATAG | 10781737 | |
| | | TG | | TTG | | |
| EKB14410.1 | 319 | TAAGTATCGATANNN | 926 | TAACTATCAATAGTT | chr17:10781706- | 6 |
| | | NNNNNTATCGATACT | | ACTATTATCGATAG | 10781737 | |
| | | TG | | TTG | | |
| ANT70015.1 | 320 | TAAGTATCGATANNN | 927 | TAACTATCAATAGTT | chr17:10781706- | 6 |
| | | NNNNNTATCGATACT | | ACTATTATCGATAG | 10781737 | |
| | | TG | | TTG | | |
| EHI53752.1 | 321 | TAAGTATCGATANNN | 928 | TAACTATCAATAGTT | chr17:10781706- | 6 |
| | | NNNNNTATCGATACT | | ACTATTATCGATAG | 10781737 | |
| | | TG | | TTG | | |
| WP_0459721 | 322 | AGACACCTCAGANNN | 929 | GGACACCTCAAATC | chr17:19544976- | 7 |
| 72.1 | | NNNNNTCTGAGGTGT | | AGTCTCTCTGAGGA | 19545007 | |
| | | TT | | GTTT | | |
| WP_0736140 | 323 | CAAGAGATCACANNN | 930 | CAAGAGATCAAACT | chr17:54312893- | 4 |
| 59.1 | | NNNNTGTGGTCTCTT | | CCCCTTGTAGCCTCT | 54312923 | |
| | | T | | TT | | |
| WP_0605948 | 324 | GTGCCACAGATANNN | 931 | GTGCCACAGACATT | chr17:72851130- | 3 |
| 81.1 | | NNNNNNTATCCGTG | | CATGGGCCATCCGT | 72851162 | |
| | | GCAC | | AGCAC | | |
| WP_0617708 | 325 | GCTGATTTCAGANNN | 932 | GCTGAGTTGAGCCC | chr18:1279099- | 5 |
| 12.1 | | NNNNNTCTGAAATCA | | AGATCTTCTGAAAT | 1279130 | |
| | | TC | | CATC | | |
| WP_0759387 | 326 | TAAATAACGATANNN | 933 | AAAATAAAAATAAA | chr18:39171014- | 5 |
| 37.1 | | NNNNNNTATCGTTAT | | AATAATTTATCGTTA | 39171046 | |
| | | TTA | | TTTA | | |
| ETI84668.1 | 327 | TAAATAACGATANNN | 934 | AAAATAAAAATAAA | chr18:39171014- | 5 |
| | | NNNNNNTATCGTTAT | | AATAATTTATCGTTA | 39171046 | |
| | | TTA | | TTTA | | |
| WP_0997384 | 328 | TGACTATCGATANNN | 935 | TGACTATCGAAAAT | chr18:70607702- | 6 |
| 55.1 | | NNNNNNTATCGATAT | | TGGAAGAGATCGTT | 70607734 | |
| | | TTA | | ATTTA | | |
| WP_0660138 | 329 | TAATGTCCAATANNN | 936 | GAATGTCCAATAAT | chr19:11489967- | 6 |
| 27.1 | | NNNNNNTATCGGAC | | TCAATCCAATCTGA | 11489999 | |
| | | ATTA | | CATTA | | |
| WP_0061208 | 330 | GATAATAAGATANNN | 937 | GATAATAAGATAAG | chr19:23120611- | 3 |
| 90.1 | | NNNNNNCATCTTATT | | TGGTTATTATCTTAT | 23120643 | |
| | | ATC | | TAAA | | |
| PQV52181.1 | 331 | CAGCTATTGATANNN | 938 | TAGCTATTGATATTT | chr19:54357168- | 6 |
| | | NNNNNTATCAATAGT | | AAATTTATCCAAAG | 54357199 | |
| | | TG | | TTG | | |
| WP_1055081 | 332 | CAGCTATTGATANNN | 939 | TAGCTATTGATATTT | chr19:54357168- | 6 |
| 22.1 | | NNNNNTATCAATAGT | | AAATTTATCCAAAG | 54357199 | |
| | | TG | | TTG | | |
| EJT85494.1 | 333 | TCAGGTTCGAGANNN | 940 | TCAGGTTAGAGTTA | chr19:8046629- | 6 |
| | | NNNNNNTCTCGAAC | | ACCAAATTCTCGAA | 8046661 | |
| | | GTCA | | CATCA | | |
| WP_0354129 | 334 | CTACTTGTGATANNN | 941 | CTACTTGAGATATTT | chr2:112731169- | 5 |
| 14.1 | | NNNNNNTATCACAA | | TTCAGATAACACAA | 112731201 | |
| | | GTAG | | GTAT | | |
| WP_0053316 | 335 | AAAAGGTACTATANN | 942 | TAAAGCTACTATAC | chr2:126383828- | 6 |
| 70.1 | | NNNNNNNTATAGTA | | AGAGGAACTATAGT | 126383862 | |
| | | CCTTTT | | ACCATTT | | |
| WP_0107368 | 336 | ATACAATAGACANNN | 943 | ATACAATATACAAT | chr2:143143340- | 5 |
| 91.1 | | NNNNNAGCCTATTGT | | TAACATAGTATATT | 143143371 | |
| | | AT | | GTAT | | |
| WP_0107523 | 337 | ATACAATAGACANNN | 944 | ATACAATATACAAT | chr2:143143340- | 5 |
| 16.1 | | NNNNNAGCCTATTGT | | TAACATAGTATATT | 143143371 | |
| | | AT | | GTAT | | |
| PKP94160.1 | 338 | AGAGTGTTGATANNN | 945 | AGAGTGTTGATAAA | chr2:16118225- | 6 |
| | | NNNNNNTATCAACAC | | TTAGTGATATCAAG | 16118257 | |
| | | TAG | | TTTAG | | |
| WP_0149532 | 339 | ATTACTATCGATANN | 946 | ATTATTATCGATAAT | chr2:161938519- | 4 |
| 67.1 | | NNNNNNNTATCGTTA | | AATCTATTATCGATA | 161938553 | |
| | | GTAAT | | ATAAT | | |
| WP_0659972 | 340 | TAACTATCGATANNN | 947 | TTATTATCGATAATA | chr2:161938520- | 6 |
| 27.1 | | NNNNNNTATCGATAA | | ATCTATTATCGATAA | 161938552 | |
| | | TGA | | TAA | | |
| WP_0152415 | 341 | TCACTATCGATANNN | 948 | TTATTATCGATAATA | chr2:161938520- | 6 |
| 50.1 | | NNNNNNTATCGATAA | | ATCTATTATCGATAA | 161938552 | |
| | | TGA | | TAA | | |
| WP_1134800 | 342 | TCACTATCGATANNN | 949 | TTATTATCGATAATA | chr2:161938520- | 6 |
| 34.1 | | NNNNNNTATCGATAA | | ATCTATTATCGATAA | 161938552 | |
| | | TGA | | TAA | | |
| WP_1048400 | 343 | TCACTATCGATANNN | 950 | TTATTATCGATAATA | chr2:161938520- | 6 |
| 46.1 | | NNNNNNTATCGATA | | ATCTATTATCGATAA | 161938552 | |
| | | GTAA | | TAA | | |
| PZN95492.1 | 344 | TTACTATCGATANNN | 951 | TTATTATCGATAATA | chr2:161938520- | 6 |
| | | NNNNNNTATCGATA | | ATCTATTATCGATAA | 161938552 | |
| | | GTGA | | TAA | | |
| WP_0577957 | 345 | CTATGTCCAATANNN | 952 | ATATGTCCAATATG | chr2:166851262- | 5 |
| 42.1 | | NNNNNNTATCGGAC | | GGGTTAATATCTAA | 166851294 | |
| | | ATAT | | CATAT | | |
| WP_0894235 | 346 | CTATGTCCAATANNN | 953 | ATATGTCCAATATG | chr2:166851262- | 5 |
| 62.1 | | NNNNNNTATCGGAC | | GGGTTAATATCTAA | 166851294 | |
| | | ATAT | | CATAT | | |
| WP_0237219 | 347 | AAACGAATGATANNN | 954 | AAATAAATGATAGA | chr2:176201656- | 4 |
| 97.1 | | NNNNNNTATCATTCG | | TAAGGTCTATCATTC | 176201688 | |
| | | TTT | | ATTT | | |
| WP_0660522 | 348 | AAAACCTCCATANNN | 955 | AAACCCTGCATAAA | chr2:179830412- | 5 |
| 21.1 | | NNNNNNCATGGAGG | | AAATGATTATGGAG | 179830444 | |
| | | TTTT | | GTTTT | | |
| WP_0471389 | 349 | GGGCCCGCGAGANN | 956 | GGGCCCGCGAGAC | chr2:181684163- | 8 |
| 03.1 | | NNNNNGCTCGCGGG | | CGTGGGGCTCAGG | 181684193 | |
| | | CCC | | GGCCG | | |
| WP_0058241 | 350 | ACAAACCCTATANNN | 957 | ACATAGCCTATATCT | chr2:190037319- | 7 |
| 23.1 | | NNNNTATAGGGTTAC | | TCATTATAGGGTTA | 190037349 | |
| | | T | | TT | | |
| WP_0008178 | 351 | TACACGTTACATANN | 958 | TATACTTTACATACT | chr2:203639620- | 6 |
| 56.1 | | NNNNNNTATGTAAAT | | TTATTGTATGTAAAT | 203639653 | |
| | | TGTA | | TATA | | |
| WP_0152177 | 352 | CTACCCAAGAGANNN | 959 | CTACCCAAGAGATA | chr2:21047490- | 5 |
| 82.1 | | NNNNNNACTGTTGG | | AGGTCAGAATGTTG | 21047522 | |
| | | GTAG | | AGTCG | | |
| WP_0707260 | 353 | ATAAGTTATGATANN | 960 | ATAAGTAATGATAA | chr2:214027139- | 6 |
| 79.1 | | NNNNNNNTATCATAA | | AATATTAGTATGAT | 214027173 | |
| | | CCTAT | | AACCTTT | | |
| WP_0000596 | 354 | CTATTAGCCACANNN | 961 | CCAGTAGCCACAAG | chr2:217887121- | 6 |
| 22.1 | | NNNNNTGTAGCAAAT | | TGATAGTCTAGCAA | 217887152 | |
| | | AG | | ATAG | | |
| WP_0153698 | 355 | CTATTAGCCACANNN | 962 | CCAGTAGCCACAAG | chr2:217887121- | 6 |
| 06.1 | | NNNNNTGTAGCAAAT | | TGATAGTCTAGCAA | 217887152 | |
| | | AG | | ATAG | | |
| WP_0130588 | 356 | TCTGTAACAAGANNN | 963 | TCTGTAAGAAGAAG | chr2:223156070- | 8 |
| 85.1 | | NNNNNTCTTGTTACA | | GAACACACTTCTTA | 223156101 | |
| | | GA | | CAGA | | |
| WP_0130582 | 357 | TCTGTAACAAGANNN | 964 | TCTGTAAGAAGAAG | chr2:223156070- | 8 |
| 63.1 | | NNNNNTCTTGTTACA | | GAACACACTTCTTA | 223156101 | |
| | | GA | | CAGA | | |
| WP_0569221 | 358 | GGCGGCCCGACANN | 965 | GGCGGCCCGGCTTG | chr2:231037589- | 7 |
| 10.1 | | NNNNNNNTGCCGGG | | CGCGCCCTGCCGAG | 231037621 | |
| | | CCGCC | | CCGCC | | |
| WP_0544480 | 359 | AACAGCCGAAGANN | 966 | AACAGCCCAAGAAT | chr2:23112541- | 6 |
| 37.1 | | NNNNNNTCTTCGGCC | | TTGTGTTCCTCGGC | 23112572 | |
| | | TTT | | CATT | | |
| WP_0107446 | 360 | CCCTTGCAAAGANNN | 967 | CCCTTGCAAAGGCT | chr2:236703920- | 7 |
| 10.1 | | NNNNNNTCATTTCAA | | TCAACCATCATTTCA | 236703952 | |
| | | GGG | | GGTG | | |
| WP_0161799 | 361 | CCCTTGCAAAGANNN | 968 | CCCTTGCAAAGGCT | chr2:236703920- | 7 |
| 37.1 | | NNNNNNTCATTTCAA | | TCAACCATCATTTCA | 236703952 | |
| | | GGG | | GGTG | | |
| WP_0492204 | 362 | CCCTTGCAAAGANNN | 969 | CCCTTGCAAAGGCT | chr2:236703920- | 7 |
| 44.1 | | NNNNNNTCATTTCAA | | TCAACCATCATTTCA | 236703952 | |
| | | GGG | | GGTG | | |
| WP_0889323 | 363 | CCCTTGCAAAGANNN | 970 | CCCTTGCAAAGGCT | chr2:236703920- | 7 |
| 58.1 | | NNNNNNTCATTTCAA | | TCAACCATCATTTCA | 236703952 | |
| | | GGG | | GGTG | | |
| WP_0212680 | 364 | GACTGGCAAAGANN | 971 | GACTGAGAAAGAG | chr2:25905759- | 5 |
| 46.1 | | NNNNNGCTTTGTCAG | | AAAGCCACTTTGTC | 25905789 | |
| | | TC | | AGTC | | |
| WP_0515175 | 365 | AGCGGCGGGAGANN | 972 | GGCGGCGGGAGGT | chr2:29921526- | 5 |
| 28.1 | | NNNNNNGCTCCCACC | | ACCAGCTGCTACCA | 29921557 | |
| | | GCT | | CCGCT | | |
| WP_1002517 | 366 | CTACGTCTGATANNN | 973 | CTACGTCTGAGAAC | chr2:36563545- | 7 |
| 39.1 | | NNNNNNTATCAGAC | | GTGCTCCTATCAAA | 36563577 | |
| | | GCTG | | CGCTT | | |
| WP_0200945 | 367 | CTACGTCTGATANNN | 974 | CTACGTCTGAGAAC | chr2:36563545- | 7 |
| 36.1 | | NNNNNNTATCAGAC | | GTGCTCCTATCAAA | 36563577 | |
| | | GCTG | | CGCTT | | |
| WP_1039851 | 368 | CTACGTCTGATANNN | 975 | CTACGTCTGAGAAC | chr2:36563545- | 7 |
| 18.1 | | NNNNNNTATCAGAC | | GTGCTCCTATCAAA | 36563577 | |
| | | GCTG | | CGCTT | | |
| WP_0143509 | 369 | ATACCCCAGATANNN | 976 | ATATGCCAGATAAG | chr2:37280854- | 8 |
| 44.1 | | NNNNNNTATCCGGG | | GGACTAGTATCCAG | 37280886 | |
| | | GTAT | | GGTAT | | |
| WP_0245455 | 370 | AAGCTTACGATANNN | 977 | AAGCTTACCATAAT | chr2:50517209- | 6 |
| 67.1 | | NNNNNTTTCGTAAGC | | CTGATTTATGGTAA | 50517240 | |
| | | TT | | GCTT | | |
| WP_0226149 | 371 | GGTAGTAACAGANN | 978 | GGTAGCAACTGAAG | chr2:66826551- | 7 |
| 60.1 | | NNNNNACTGTTACTA | | GCTGGACTGTTTCT | 66826581 | |
| | | CC | | ACC | | |
| WP_0719741 | 372 | ACATGTCCGATANNN | 979 | ACATGTACAATAAA | chr2:88631593- | 6 |
| 81.1 | | NNNNNNTATTGGAC | | CTGAACCTATTGGA | 88631625 | |
| | | ATAT | | AATAT | | |
| WP_0095572 | 373 | TAGTTGGTGATANNN | 980 | TGGATGGTGATACA | chr2:94826665- | 7 |
| 65.1 | | NNNNNTATCACCAAC | | GATATTTATCATCAA | 94826696 | |
| | | TC | | CTC | | |
| WP_0698556 | 374 | GGGCCTGCGAGANN | 981 | GAGCCTGGGAGAA | chr20:33704755- | 6 |
| 69.1 | | NNNNNACTCGCAGG | | ATGCAGACTCTCAG | 33704785 | |
| | | CCC | | GCCC | | |
| WP_0854213 | 375 | AAACGACCGATANNN | 982 | AAATTACCGATAAT | chr20:34466535- | 6 |
| 89.1 | | NNNNNNTATCGTTCA | | ATTATTCTATCATTC | 34466567 | |
| | | TTT | | ATTT | | |
| WP_0624461 | 376 | TAGTGTCTGAGANNN | 983 | TAGTGTCTGTGTTT | chr21:15870374- | 6 |
| 29.1 | | NNNNNTCTCAGACAC | | ATTAGCTCTCAAAC | 15870405 | |
| | | TA | | ACTA | | |
| WP_0087262 | 377 | AGAACCCGGACANN | 984 | GGAACCCGGCCATC | chr22:23385516- | NA |
| 05.1 | | NNNNNNGTTCCGGG | | CCTCTGGTTCCTGG | 23385547 | |
| | | TTCT | | TTCT | | |
| WP_0545289 | 378 | AGGGTGTTGATANNN | 985 | AGGGTGTTGACAGC | chr22:32751606- | NA |
| 82.1 | | NNNNNNTATCACCAC | | AGTGGGATATCACC | 32751638 | |
| | | TCT | | ACCTT | | |
| KPL69881.1 | 379 | AGGGTGTTGATANNN | 986 | AGGGTGTTGACAGC | chr22:32751606- | NA |
| | | NNNNNNTATCACCAC | | AGTGGGATATCACC | 32751638 | |
| | | TCT | | ACCTT | | |
| SEM26217.1 | 380 | TTATGTCCGATANNN | 987 | TTAGGTCAGATACA | chr3:110856754- | 5 |
| | | NNNNNNTATTGGAC | | TTCCAAGTATTGGA | 110856786 | |
| | | ATAG | | AATAG | | |
| WP_1061655 | 381 | TTATGTCCGATANNN | 988 | TTAGGTCAGATACA | chr3:110856754- | 5 |
| 51.1 | | NNNNNNTATTGGAC | | TTCCAAGTATTGGA | 110856786 | |
| | | ATAG | | AATAG | | |
| WP_0083358 | 382 | TTATGTCCGATANNN | 989 | TTAGGTCAGATACA | chr3:110856754- | 5 |
| 38.1 | | NNNNNNTATTGGAC | | TTCCAAGTATTGGA | 110856786 | |
| | | ATAG | | AATAG | | |
| WP_0290696 | 383 | TTGGTTGGAATANNN | 990 | TTGGTGGGAATAAA | chr3:111817292- | 5 |
| 76.1 | | NNNNNNTATTCAAAC | | CAAACAGTATCCAA | 111817324 | |
| | | CAA | | ACCAC | | |
| WP_0118869 | 384 | GAATACAACATANNN | 991 | GAATACAACAAATA | chr3:117712816- | 6 |
| 69.1 | | NNNNNTATGTTGCAT | | TTTTTCTATGTAGCA | 117712847 | |
| | | TC | | TTT | | |
| WP_0478214 | 385 | AACTCGACAATANNN | 992 | AACTAGACAAGAAC | chr3:127281819- | 6 |
| 48.1 | | NNNNTAATGTCGAGT | | TTTAATAATGTCTAG | 127281849 | |
| | | T | | TT | | |
| WP_0478251 | 386 | AACTCGACAATANNN | 993 | AACTAGACAAGAAC | chr3:127281819- | 6 |
| 38.1 | | NNNNTAATGTCGAGT | | TTTAATAATGTCTAG | 127281849 | |
| | | T | | TT | | |
| WP_1165468 | 387 | ATTAACTTCATATANN | 994 | ATTAACCTCATATAT | chr3:150147140- | 5 |
| 38.1 | | NNNNNNTATATGAA | | GGGATCCAAAATGA | 150147175 | |
| | | GTTAAT | | AGTTAAT | | |
| WP_0869047 | 388 | TCTACCAGTGATANN | 995 | TCTTCCAGTGATAA | chr3:158595931- | 6 |
| 34.1 | | NNNNNNTATCACTGG | | AACCTAAAATCAGT | 158595964 | |
| | | TAGA | | GGTAGA | | |
| WP_1331810 | 389 | TCTACCAGTGATANN | 996 | TCTTCCAGTGATAA | chr3:158595931- | 6 |
| 36.1 | | NNNNNNTATCACTGG | | AACCTAAAATCAGT | 158595964 | |
| | | TAGA | | GGTAGA | | |
| WP_1092859 | 390 | TCTACCAGTGATANN | 997 | TCTTCCAGTGATAA | chr3:158595931- | 6 |
| 90.1 | | NNNNNNTATCACTGG | | AACCTAAAATCAGT | 158595964 | |
| | | TAGA | | GGTAGA | | |
| WP_1139404 | 391 | TCTACCAGTGATANN | 998 | TCTTCCAGTGATAA | chr3:158595931- | 6 |
| 03.1 | | NNNNNNTATCACTGG | | AACCTAAAATCAGT | 158595964 | |
| | | TAGA | | GGTAGA | | |
| ACK46586.1 | 392 | TCTACCAGTGATANN | 999 | TCTTCCAGTGATAA | chr3:158595931- | 6 |
| | | NNNNNNTATCACTGG | | AACCTAAAATCAGT | 158595964 | |
| | | TAGA | | GGTAGA | | |
| AEG11408.1 | 393 | TCTACCAGTGATANN | 1000 | TCTTCCAGTGATAA | chr3:158595931- | 6 |
| | | NNNNNNTATCACTGG | | AACCTAAAATCAGT | 158595964 | |
| | | TAGA | | GGTAGA | | |
| WP_0812484 | 394 | TCTACCAGTGATANN | 1001 | TCTTCCAGTGATAA | chr3:158595931- | 6 |
| 13.1 | | NNNNNNTATCACTGG | | AACCTAAAATCAGT | 158595964 | |
| | | TAGA | | GGTAGA | | |
| WP_0122771 | 395 | TCTACCAGTGATANN | 1002 | TCTTCCAGTGATAA | chr3:158595931- | 6 |
| 58.1 | | NNNNNNTATCACTGG | | AACCTAAAATCAGT | 158595964 | |
| | | TAGA | | GGTAGA | | |
| WP_0125868 | 396 | TCTACCAGTGATANN | 1003 | TCTTCCAGTGATAA | chr3:158595931- | 6 |
| 24.1 | | NNNNNNTATCACTGG | | AACCTAAAATCAGT | 158595964 | |
| | | TAGA | | GGTAGA | | |
| WP_0817290 | 397 | TCTACCAGTGATANN | 1004 | TCTTCCAGTGATAA | chr3:158595931- | 6 |
| 30.1 | | NNNNNNTATCACTGG | | AACCTAAAATCAGT | 158595964 | |
| | | TAGA | | GGTAGA | | |
| KZK70296.1 | 398 | TCTACCAGTGATANN | 1005 | TCTTCCAGTGATAA | chr3:158595931- | 6 |
| | | NNNNNNTATCACTGG | | AACCTAAAATCAGT | 158595964 | |
| | | TAGA | | GGTAGA | | |
| WP_0121545 | 399 | CTACCAGTGATANNN | 1006 | CTTCCAGTGATAAA | chr3:158595932- | 6 |
| 34.1 | | NNNNNTATCACTGGT | | ACCTAAAATCAGTG | 158595963 | |
| | | AG | | GTAG | | |
| ABV87414.1 | 400 | CTACCAGTGATANNN | 1007 | CTTCCAGTGATAAA | chr3:158595932- | 6 |
| | | NNNNNTATCACTGGT | | ACCTAAAATCAGTG | 158595963 | |
| | | AG | | GTAG | | |
| WP_0116227 | 401 | CTACCAGTGATANNN | 1008 | CTTCCAGTGATAAA | chr3:158595932- | 6 |
| 13.1 | | NNNNNTATCACTGGT | | ACCTAAAATCAGTG | 158595963 | |
| | | AG | | GTAG | | |
| WP_0517141 | 402 | CTACCAGTGATANNN | 1009 | CTTCCAGTGATAAA | chr3:158595932- | 6 |
| 41.1 | | NNNNNTATCACTGGT | | ACCTAAAATCAGTG | 158595963 | |
| | | AG | | GTAG | | |
| WP_0777514 | 403 | CTACCAGTGATANNN | 1010 | CTTCCAGTGATAAA | chr3:158595932- | 6 |
| 11.1 | | NNNNNTATCACTGGT | | ACCTAAAATCAGTG | 158595963 | |
| | | AG | | GTAG | | |
| WP_0130514 | 404 | CTACCAGTGATANNN | 1011 | CTTCCAGTGATAAA | chr3:158595932- | 6 |
| 10.1 | | NNNNNTATCACTGGT | | ACCTAAAATCAGTG | 158595963 | |
| | | AG | | GTAG | | |
| WP_1153345 | 405 | CTACCAGTGATANNN | 1012 | CTTCCAGTGATAAA | chr3:158595932- | 6 |
| 56.1 | | NNNNNTATCACTGGT | | ACCTAAAATCAGTG | 158595963 | |
| | | AG | | GTAG | | |
| WP_1264918 | 406 | CTACCAGTGATANNN | 1013 | CTTCCAGTGATAAA | chr3:158595932- | 6 |
| 84.1 | | NNNNNTATCACTGGT | | ACCTAAAATCAGTG | 158595963 | |
| | | AG | | GTAG | | |
| WP_0209126 | 407 | CTACCAGTGATANNN | 1014 | CTTCCAGTGATAAA | chr3:158595932- | 6 |
| 17.1 | | NNNNNTATCACTGGT | | ACCTAAAATCAGTG | 158595963 | |
| | | AG | | GTAG | | |
| WP_0882111 | 408 | CTACCAGTGATANNN | 1015 | CTTCCAGTGATAAA | chr3:158595932- | 6 |
| 52.1 | | NNNNNTATCACTGGT | | ACCTAAAATCAGTG | 158595963 | |
| | | AG | | GTAG | | |
| WP_0116261 | 409 | CTACCAGTGATANNN | 1016 | CTTCCAGTGATAAA | chr3:158595932- | 6 |
| 97.1 | | NNNNNTATCACTGGT | | ACCTAAAATCAGTG | 158595963 | |
| | | AG | | GTAG | | |
| WP_0110723 | 410 | CTACCAGTGATANNN | 1017 | CTTCCAGTGATAAA | chr3:158595932- | 6 |
| 65.1 | | NNNNNTATCACTGGT | | ACCTAAAATCAGTG | 158595963 | |
| | | AG | | GTAG | | |
| WP_0694554 | 411 | CTACCAGTGATANNN | 1018 | CTTCCAGTGATAAA | chr3:158595932- | 6 |
| 45.1 | | NNNNNTATCACTGGT | | ACCTAAAATCAGTG | 158595963 | |
| | | AG | | GTAG | | |
| WP_0509913 | 412 | CTACCAGTGATANNN | 1019 | CTTCCAGTGATAAA | chr3:158595932- | 6 |
| 48.1 | | NNNNNTATCACTGGT | | ACCTAAAATCAGTG | 158595963 | |
| | | AG | | GTAG | | |
| WP_0556473 | 413 | CTACCAGTGATANNN | 1020 | CTTCCAGTGATAAA | chr3:158595932- | 6 |
| 63.1 | | NNNNNTATCACTGGT | | ACCTAAAATCAGTG | 158595963 | |
| | | AG | | GTAG | | |
| WP_1123527 | 414 | CTACCAGTGATANNN | 1021 | CTTCCAGTGATAAA | chr3:158595932- | 6 |
| 96.1 | | NNNNNTATCACTGGT | | ACCTAAAATCAGTG | 158595963 | |
| | | AG | | GTAG | | |
| WP_1052525 | 415 | CTACCAGTGATANNN | 1022 | CTTCCAGTGATAAA | chr3:158595932- | 6 |
| 41.1 | | NNNNNTATCACTGGT | | ACCTAAAATCAGTG | 158595963 | |
| | | AG | | GTAG | | |
| WP_0120892 | 416 | CTACCAGTGATANNN | 1023 | CTTCCAGTGATAAA | chr3:158595932- | 6 |
| 73.1 | | NNNNNTATCACTGGT | | ACCTAAAATCAGTG | 158595963 | |
| | | AG | | GTAG | | |
| WP_0719394 | 417 | CTACCAGTGATANNN | 1024 | CTTCCAGTGATAAA | chr3:158595932- | 6 |
| 73.1 | | NNNNNTATCACTGGT | | ACCTAAAATCAGTG | 158595963 | |
| | | AG | | GTAG | | |
| WP_0143580 | 418 | CTACCAGTGATANNN | 1025 | CTTCCAGTGATAAA | chr3:158595932- | 6 |
| 05.1 | | NNNNNTATCACTGGT | | ACCTAAAATCAGTG | 158595963 | |
| | | AG | | GTAG | | |
| WP_1066505 | 419 | CTACCAGTGATANNN | 1026 | CTTCCAGTGATAAA | chr3:158595932- | 6 |
| 61.1 | | NNNNNTATCACTGGT | | ACCTAAAATCAGTG | 158595963 | |
| | | AG | | GTAG | | |
| WP_0764115 | 420 | CTACCAGTGATANNN | 1027 | CTTCCAGTGATAAA | chr3:158595932- | 6 |
| 19.1 | | NNNNNTATCACTGGT | | ACCTAAAATCAGTG | 158595963 | |
| | | AG | | GTAG | | |
| WP_0123250 | 421 | CTACCAGTGATANNN | 1028 | CTTCCAGTGATAAA | chr3:158595932- | 6 |
| 03.1 | | NNNNNTATCACTGGT | | ACCTAAAATCAGTG | 158595963 | |
| | | AG | | GTAG | | |
| WP_1010902 | 422 | CTACCAGTGATANNN | 1029 | CTTCCAGTGATAAA | chr3:158595932- | 6 |
| 09.1 | | NNNNNTATCACTGGT | | ACCTAAAATCAGTG | 158595963 | |
| | | AG | | GTAG | | |
| WP_1151369 | 423 | CTACCAGTGATANNN | 1030 | CTTCCAGTGATAAA | chr3:158595932- | 6 |
| 67.1 | | NNNNNTATCACTGGT | | ACCTAAAATCAGTG | 158595963 | |
| | | AG | | GTAG | | |
| WP_0647913 | 424 | CTACCAGTGATANNN | 1031 | CTTCCAGTGATAAA | chr3:158595932- | 6 |
| 49.1 | | NNNNNTATCACTGGT | | ACCTAAAATCAGTG | 158595963 | |
| | | AG | | GTAG | | |
| WP_0121425 | 425 | CTACCAGTGATANNN | 1032 | CTTCCAGTGATAAA | chr3:158595932- | 6 |
| 88.1 | | NNNNNTATCACTGGT | | ACCTAAAATCAGTG | 158595963 | |
| | | AG | | GTAG | | |
| WP_1265205 | 426 | CTACCAGTGATANNN | 1033 | CTTCCAGTGATAAA | chr3:158595932- | 6 |
| 63.1 | | NNNNNTATCACTGGT | | ACCTAAAATCAGTG | 158595963 | |
| | | AG | | GTAG | | |
| WP_1089465 | 427 | CTACCAGTGATANNN | 1034 | CTTCCAGTGATAAA | chr3:158595932- | 6 |
| 65.1 | | NNNNNTATCACTGGT | | ACCTAAAATCAGTG | 158595963 | |
| | | AG | | GTAG | | |
| WP_0374112 | 428 | CTACCAGTGATANNN | 1035 | CTTCCAGTGATAAA | chr3:158595932- | 6 |
| 15.1 | | NNNNNTATCACTGGT | | ACCTAAAATCAGTG | 158595963 | |
| | | AG | | GTAG | | |
| OIO40422.1 | 429 | CCGTACTATATANNN | 1036 | CGCTACTATATAAA | chr3:162275981- | 5 |
| | | NNNNNTATATAATGC | | GAGTAATATATAAT | 162276012 | |
| | | GG | | GCAG | | |
| WP_0479148 | 430 | GAAACGTTGATANNN | 1037 | GAAATGTTCATAAT | chr3:164474658- | 5 |
| 82.1 | | NNNNNNTATTAACGT | | ATTCCTTTATTAATG | 164474690 | |
| | | TTT | | TTTT | | |
| WP_0107292 | 431 | GAAACGTTGATANNN | 1038 | GAAATGTTCATAAT | chr3:164474658- | 5 |
| 68.1 | | NNNNNNTATTAACGT | | ATTCCTTTATTAATG | 164474690 | |
| | | TTT | | TTTT | | |
| WP_0031719 | 432 | AAACCCTCAACANNN | 1039 | AAACCCTCAACAAA | chr3:166919839- | 7 |
| 84.1 | | NNNNTGTCAAGGGTT | | CTAAGTATCAAAGG | 166919869 | |
| | | T | | TAT | | |
| WP_0336601 | 433 | AAACCCTCAACANNN | 1040 | AAACCCTCAACAAA | chr3:166919839- | 7 |
| 84.1 | | NNNNTGTCAAGGGTT | | CTAAGTATCAAAGG | 166919869 | |
| | | T | | TAT | | |
| WP_0020768 | 434 | AAACCCTCAACANNN | 1041 | AAACCCTCAACAAA | chr3:166919839- | 7 |
| 80.1 | | NNNNTGTCAAGGGTT | | CTAAGTATCAAAGG | 166919869 | |
| | | T | | TAT | | |
| WP_0161158 | 435 | AAACCCTCAACANNN | 1042 | AAACCCTCAACAAA | chr3:166919839- | 7 |
| 18.1 | | NNNNTGTCAAGGGTT | | CTAAGTATCAAAGG | 166919869 | |
| | | T | | TAT | | |
| WP_0117361 | 436 | TCGGTATATATANNN | 1043 | TCTGTATATATAAG | chr3:174585052- | 5 |
| 63.1 | | NNNNCACATATACCG | | AATAACACATATTCT | 174585082 | |
| | | A | | GA | | |
| WP_0444023 | 437 | CATCAAGTGATANNN | 1044 | CTTCAAGTGATATT | chr3:27705115- | 5 |
| 40.1 | | NNNNNTATCGCTTGA | | ATATTATACCACTTG | 27705146 | |
| | | TG | | ATG | | |
| WP_0084001 | 438 | GCAGAGTGAAGANN | 1045 | TCAGAGGGAAGAA | chr3:48141565- | 5 |
| 48.1 | | NNNNNNTCCTCGCTC | | TACCTGCTCCTGGC | 48141596 | |
| | | TGC | | TCTGC | | |
| WP_0568715 | 439 | AAAAACGGCATANNN | 1046 | AAAAATGGTATAAG | chr3:50885338- | 6 |
| 37.1 | | NNNNNTATGCCGTTT | | CTTTTGTATGCAGTT | 50885369 | |
| | | TT | | TTT | | |
| WP_0029908 | 440 | TTAATGAGTAGANNN | 1047 | TTAATGAGTACACA | chr3:54189864- | 6 |
| 81.1 | | NNNNNTCTACTCATT | | TAATTTTLTALTTTT | 54189895 | |
| | | AA | | TAA | | |
| WP_0418906 | 441 | TTAATGAGTAGANNN | 1048 | TTAATGAGTACACA | chr3:54189864- | 6 |
| 31.1 | | NNNNNTCTACTCATT | | TAATTTTLTALTTTT | 54189895 | |
| | | AA | | TAA | | |
| WP_0112793 | 442 | AGGTTAATATAGANN | 1049 | AGGTTAAAATAGAC | chr3:60883844- | 4 |
| 65.1 | | NNNNNNTTTATATTA | | AAATGGGATTATAT | 60883877 | |
| | | AGCT | | CAAGCT | | |
| YP_0092216 | 443 | ATAAGACATAGANNN | 1050 | ATAAGCCATAGAGC | chr3:64770759- | 6 |
| 49.1 | | NNNNNNTCTATGTCT | | CCCCATCTCTGTGTC | 64770791 | |
| | | TAT | | CTAT | | |
| WP_0763847 | 444 | CTGGCAAGCCATANN | 1051 | CTGGCAAGGCATAA | chr3:86065715- | 5 |
| 67.1 | | NNNNNNNTATATCTT | | AGGTACGTTATATT | 86065749 | |
| | | GCCAG | | TAGCCAG | | |
| WP_0171356 | 445 | CTGGCAAGCCATANN | 1052 | CTGGCAAGGCATAA | chr3:86065715- | 5 |
| 69.1 | | NNNNNNNTATATCTT | | AGGTACGTTATATT | 86065749 | |
| | | GCCAG | | TAGCCAG | | |
| WP_1026053 | 446 | TGACCCACGATANNN | 1053 | TGAACCACAATATT | chr3:95971700- | 5 |
| 25.1 | | NNNNNNTATCGTGG | | TCTCAACTATCTTGG | 95971732 | |
| | | GTGA | | GTGA | | |
| WP_0028277 | 447 | GAAGTTGGGACANN | 1054 | CAGGTTGGGACCAT | chr4:108054576- | 5 |
| 82.1 | | NNNNNNTGTTCCAAC | | TTCTGCTGTTCCAAC | 108054607 | |
| | | TTC | | TTC | | |
| WP_0695521 | 448 | TTAGGTCTGATANNN | 1055 | CTAGGTCTGATATC | chr4:143442555- | 5 |
| 41.1 | | NNNNNNTATCCGACA | | ACTCATGTATCCCAC | 143442587 | |
| | | TAA | | ATTA | | |
| AZE17458.1 | 449 | TTAGGTCTGATANNN | 1056 | CTAGGTCTGATATC | chr4:143442555- | 5 |
| | | NNNNNNTATCCGACC | | ACTCATGTATCCCAC | 143442587 | |
| | | TTA | | ATTA | | |
| SDY43398.1 | 450 | TTAGGTCTGATANNN | 1057 | CTAGGTCTGATATC | chr4:143442555- | 5 |
| | | NNNNNNTATCCGACC | | ACTCATGTATCCCAC | 143442587 | |
| | | TTA | | ATTA | | |
| AZD92641.1 | 451 | TTAGGTCTGATANNN | 1058 | CTAGGTCTGATATC | chr4:143442555- | 5 |
| | | NNNNNNTATCCGACC | | ACTCATGTATCCCAC | 143442587 | |
| | | TTA | | ATTA | | |
| WP_0821432 | 452 | TTAGGTCTGATANNN | 1059 | CTAGGTCTGATATC | chr4:143442555- | 5 |
| 26.1 | | NNNNNNTATCCGACC | | ACTCATGTATCCCAC | 143442587 | |
| | | TTA | | ATTA | | |
| WP_1106236 | 453 | TTAGGTCTGATANNN | 1060 | CTAGGTCTGATATC | chr4:143442555- | 5 |
| 42.1 | | NNNNNNTATCCGACC | | ACTCATGTATCCCAC | 143442587 | |
| | | TTA | | ATTA | | |
| RIA35947.1 | 454 | TTAGGTCTGATANNN | 1061 | CTAGGTCTGATATC | chr4:143442555- | 5 |
| | | NNNNNNTATCCGACC | | ACTCATGTATCCCAC | 143442587 | |
| | | TTA | | ATTA | | |
| AZC51718.1 | 455 | TTAGGTCTGATANNN | 1062 | CTAGGTCTGATATC | chr4:143442555- | 5 |
| | | NNNNNNTATCCGACC | | ACTCATGTATCCCAC | 143442587 | |
| | | TTA | | ATTA | | |
| WP_0034523 | 456 | TTAGGTCTGATANNN | 1063 | CTAGGTCTGATATC | chr4:143442555- | 5 |
| 52.1 | | NNNNNNTATCCGACC | | ACTCATGTATCCCAC | 143442587 | |
| | | TTA | | ATTA | | |
| WP_1080997 | 457 | TTAGGTCTGATANNN | 1064 | CTAGGTCTGATATC | chr4:143442555- | 5 |
| 39.1 | | NNNNNNTATCCGACC | | ACTCATGTATCCCAC | 143442587 | |
| | | TTA | | ATTA | | |
| WP_1106375 | 458 | TTAGGTCTGATANNN | 1065 | CTAGGTCTGATATC | chr4:143442555- | 5 |
| 60.1 | | NNNNNNTATCCGACC | | ACTCATGTATCCCAC | 143442587 | |
| | | TTA | | ATTA | | |
| WP_0452178 | 459 | TTAGGTCTGATANNN | 1066 | CTAGGTCTGATATC | chr4:143442555- | 5 |
| 96.1 | | NNNNNNTATCCGACC | | ACTCATGTATCCCAC | 143442587 | |
| | | TTA | | ATTA | | |
| WP_1283253 | 460 | TTAGGTCTGATANNN | 1067 | CTAGGTCTGATATC | chr4:143442555- | 5 |
| 17.1 | | NNNNNNTATCCGACC | | ACTCATGTATCCCAC | 143442587 | |
| | | TTA | | ATTA | | |
| OWK92550.1 | 461 | TTAGGTCTGATANNN | 1068 | CTAGGTCTGATATC | chr4:143442555- | 5 |
| | | NNNNNNTATCCGACC | | ACTCATGTATCCCAC | 143442587 | |
| | | TTA | | ATTA | | |
| WP_0247174 | 462 | TTAGGTCTGATANNN | 1069 | CTAGGTCTGATATC | chr4:143442555- | 5 |
| 80.1 | | NNNNNNTATCCGACC | | ACTCATGTATCCCAC | 143442587 | |
| | | TTA | | ATTA | | |
| WP_1012936 | 463 | TTAGGTCTGATANNN | 1070 | CTAGGTCTGATATC | chr4:143442555- | 5 |
| 15.1 | | NNNNNNTATCCGACC | | ACTCATGTATCCCAC | 143442587 | |
| | | TTA | | ATTA | | |
| WP_0316426 | 464 | TTAGGTCTGATANNN | 1071 | CTAGGTCTGATATC | chr4:143442555- | 5 |
| 20.1 | | NNNNNNTATCCGACC | | ACTCATGTATCCCAC | 143442587 | |
| | | TTA | | ATTA | | |
| WP_0429487 | 465 | TTAGGTCTGATANNN | 1072 | CTAGGTCTGATATC | chr4:143442555- | 5 |
| 96.1 | | NNNNNNTATCCGACC | | ACTCATGTATCCCAC | 143442587 | |
| | | TTA | | ATTA | | |
| WP_1033260 | 466 | TGACAGTGGATANNN | 1073 | TGAAAGTGGAGAA | chr4:160047452- | 4 |
| 70.1 | | NNNNNNTATCCAATC | | ATAAGAACAATCCA | 160047484 | |
| | | TCA | | ATCTCA | | |
| WP_0764496 | 467 | TTAGTTATGATANNN | 1074 | TTAGTTATTATAACT | chr4:172157070- | 7 |
| 57.1 | | NNNNGATCATAACTA | | TTCCTATTATAACTA | 172157100 | |
| | | A | | A | | |
| WP_0746356 | 468 | GCTATCTGAACANNN | 1075 | GCTATATGAACAGA | chr4:176324510- | 4 |
| 93.1 | | NNNNNTGTTCAGATT | | CGTTAATGTTCATAT | 176324541 | |
| | | GA | | TCA | | |
| WP_0346339 | 469 | GATGACTTTACANNN | 1076 | GATGACTTTACCCT | chr4:187632588- | 5 |
| 66.1 | | NNNNNTGTAAAGTCA | | ATTTCTTGTGAAGT | 187632619 | |
| | | TC | | GATC | | |
| WP_0125492 | 470 | CTCAATTTCACANNN | 1077 | CTCAATTACACACCT | chr4:46313749- | 6 |
| 23.1 | | NNNNTGTGAAATTGA | | GAGATTTGAAATTC | 46313779 | |
| | | G | | AG | | |
| WP_0161104 | 471 | AAGGGGAACAGANN | 1078 | AAGAGGAACAGAT | chr4:74631209- | 6 |
| 51.1 | | NNNNNTCCGTTCCCC | | ATTCTTTCCCTTCCC | 74631239 | |
| | | TT | | ATT | | |
| WP_0486588 | 472 | AGCTAGGTAAGANN | 1079 | AGATAGGTAAGATT | chr4:76517527- | 6 |
| 60.1 | | NNNNNNTCTTACCTA | | TAGGATTCTTATCCA | 76517558 | |
| | | TGT | | TGT | | |
| WP_0699453 | 473 | GAAATCGTAATANNN | 1080 | GAAATATTAATAAC | chr4:80833020- | 5 |
| 92.1 | | NNNNNTATTACGATT | | TGAAAGTATTACGT | 80833051 | |
| | | TG | | TTTG | | |
| WP_0850707 | 474 | TATTACTATTGATANN | 1081 | TATAACTAGTGATA | chr5:110266292- | 5 |
| 31.1 | | NNNNNNNTATCACTA | | GATAACAGTTATCA | 110266328 | |
| | | GTAATA | | CTAGTTATA | | |
| OCW82643.1 | 475 | ATTACTATTGATANN | 1082 | ATAACTAGTGATAG | chr5:110266293- | 5 |
| | | NNNNNNNTATCACTA | | ATAACAGTTATCAC | 110266327 | |
| | | GTAAT | | TAGTTAT | | |
| WP_0374128 | 476 | ACTGAGCTAATANNN | 1083 | ACTGAATAAATATT | chr5:112739101- | 5 |
| 68.1 | | NNNNTATTAATTCAG | | TAAGATATTAATTC | 112739131 | |
| | | T | | AGT | | |
| WP_0765913 | 477 | ATCACACAGGATANN | 1084 | AACAAACAGGATAT | chr5:114709938- | 5 |
| 09.1 | | NNNNNNNTATCCTGT | | AAAGTGGTAATCCT | 114709972 | |
| | | TTTAT | | GTTTTAT | | |
| WP_0135253 | 478 | TAACGAACGATANNN | 1085 | TAACTAACGATACT | chr5:125436112- | 6 |
| 33.1 | | NNNNNNTATCATTCG | | TCTCAGATATAATTC | 125436144 | |
| | | TTG | | CTTG | | |
| WP_1274026 | 479 | TAACGAACGATANNN | 1086 | TAACTAACGATACT | chr5:125436112- | 6 |
| 74.1 | | NNNNNNTATCATTCG | | TCTCAGATATAATTC | 125436144 | |
| | | TTG | | CTTG | | |
| WP_0666056 | 480 | AGAATGGGCAGANN | 1087 | AGAATGGGCAGAA | chr5:129423741- | 5 |
| 81.1 | | NNNNNNTCTGACCCT | | AGAATGTTCTGGGA | 129423772 | |
| | | TCT | | CTTCT | | |
| WP_0809570 | 481 | TAGCTCTGGAGANNN | 1088 | TAGCTCTGGAGATA | chr5:13238067- | 7 |
| 39.1 | | NNNNNNTCTCCGGA | | GAGAGGCCCTTCAG | 13238099 | |
| | | GTTA | | AGTTA | | |
| KKX62373.1 | 482 | TAGCTCTGGAGANNN | 1089 | TAGCTCTGGAGATA | chr5:13238067- | 7 |
| | | NNNNNNTCTCCGGA | | GAGAGGCCCTTCAG | 13238099 | |
| | | GTTA | | AGTTA | | |
| WP_0400411 | 483 | AAGGGCTACAGANN | 1090 | GAGGGCTGAAGAC | chr5:13815922- | 7 |
| 54.1 | | NNNNNTCTGTAACCC | | AGAGGCTCTGTAAC | 13815952 | |
| | | TT | | CCTT | | |
| WP_0046914 | 484 | TGTTTGTTGATANNN | 1091 | TCTTTGTTGATAAGT | chr5:156255946- | 6 |
| 81.1 | | NNNNTATGGACAAAC | | ATTTTTTGTACAAAC | 156255976 | |
| | | A | | A | | |
| WP_0490066 | 485 | CCAGCGCTCAGANNN | 1092 | CCAGAGCACAGAG | chr5:168937193- | 6 |
| 36.1 | | NNNNNGCTGAGTGC | | GCCAAGGGGTGAG | 168937224 | |
| | | TGG | | TGCTGG | | |
| WP_1044604 | 486 | CCAGCGCTCAGANNN | 1093 | CCAGAGCACAGAG | chr5:168937193- | 6 |
| 35.1 | | NNNNNGCTGAGTGC | | GCCAAGGGGTGAG | 168937224 | |
| | | TGG | | TGCTGG | | |
| WP_0041869 | 487 | CCAGCGCTCAGANNN | 1094 | CCAGAGCACAGAG | chr5:168937193- | 6 |
| 33.1 | | NNNNNGCTGAGTGC | | GCCAAGGGGTGAG | 168937224 | |
| | | TGG | | TGCTGG | | |
| WP_0943201 | 488 | CCAGCGCTCAGANNN | 1095 | CCAGAGCACAGAG | chr5:168937193- | 6 |
| 39.1 | | NNNNNGCTGAGTGC | | GCCAAGGGGTGAG | 168937224 | |
| | | TGG | | TGCTGG | | |
| WP_0324356 | 489 | CCAGCGCTCAGANNN | 1096 | CCAGAGCACAGAG | chr5:168937193- | 6 |
| 50.1 | | NNNNNGCTGAGTGC | | GCCAAGGGGTGAG | 168937224 | |
| | | TGG | | TGCTGG | | |
| WP_0143865 | 490 | CCAGCGCTCAGANNN | 1097 | CCAGAGCACAGAG | chr5:168937193- | 6 |
| 29.1 | | NNNNNGCTGAGTGC | | GCCAAGGGGTGAG | 168937224 | |
| | | TGG | | TGCTGG | | |
| WP_0179011 | 491 | CCAGCGCTCAGANNN | 1098 | CCAGAGCACAGAG | chr5:168937193- | 6 |
| 02.1 | | NNNNNGCTGAGTGC | | GCCAAGGGGTGAG | 168937224 | |
| | | TGG | | TGCTGG | | |
| WP_1102048 | 492 | CCAGCGCTCAGANNN | 1099 | CCAGAGCACAGAG | chr5:168937193- | 6 |
| 72.1 | | NNNNNGCTGAGTGC | | GCCAAGGGGTGAG | 168937224 | |
| | | TGG | | TGCTGG | | |
| WP_0041975 | 493 | CCAGCGCTCAGANNN | 1100 | CCAGAGCACAGAG | chr5:168937193- | 6 |
| 71.1 | | NNNNNGCTGAGTGC | | GCCAAGGGGTGAG | 168937224 | |
| | | TGG | | TGCTGG | | |
| WP_0877285 | 494 | CCAGCGCTCAGANNN | 1101 | CCAGAGCACAGAG | chr5:168937193- | 6 |
| 82.1 | | NNNNNGCTGAGTGC | | GCCAAGGGGTGAG | 168937224 | |
| | | TGG | | TGCTGG | | |
| WP_0324132 | 495 | CCAGCGCTCAGANNN | 1102 | CCAGAGCACAGAG | chr5:168937193- | 6 |
| 33.1 | | NNNNNGCTGAGTGC | | GCCAAGGGGTGAG | 168937224 | |
| | | TGG | | TGCTGG | | |
| WP_0969037 | 496 | CCAGCGCTCAGANNN | 1103 | CCAGAGCACAGAG | chr5:168937193- | 6 |
| 42.1 | | NNNNNGCTGAGTGC | | GCCAAGGGGTGAG | 168937224 | |
| | | TGG | | TGCTGG | | |
| WP_1309532 | 497 | CCAGCGCTCAGANNN | 1104 | CCAGAGCACAGAG | chr5:168937193- | 6 |
| 38.1 | | NNNNNGCTGAGTGC | | GCCAAGGGGTGAG | 168937224 | |
| | | TGG | | TGCTGG | | |
| VGI65087.1 | 498 | CCAGCGCTCAGANNN | 1105 | CCAGAGCACAGAG | chr5:168937193- | 6 |
| | | NNNNNGCTGAGTGC | | GCCAAGGGGTGAG | 168937224 | |
| | | TGG | | TGCTGG | | |
| WP_0853533 | 499 | CCAGCGCTCAGANNN | 1106 | CCAGAGCACAGAG | chr5:168937193- | 6 |
| 66.1 | | NNNNNGCTGAGTGC | | GCCAAGGGGTGAG | 168937224 | |
| | | TGG | | TGCTGG | | |
| WP_0809229 | 500 | CCAGCGCTCAGANNN | 1107 | CCAGAGCACAGAG | chr5:168937193- | 6 |
| 91.1 | | NNNNNGCTGAGTGC | | GCCAAGGGGTGAG | 168937224 | |
| | | TGG | | TGCTGG | | |
| WP_1157936 | 501 | CCAGCGCTCAGANNN | 1108 | CCAGAGCACAGAG | chr5:168937193- | 6 |
| 42.1 | | NNNNNGCTGAGTGC | | GCCAAGGGGTGAG | 168937224 | |
| | | TGG | | TGCTGG | | |
| WP_0853544 | 502 | CCAGCGCTCAGANNN | 1109 | CCAGAGCACAGAG | chr5:168937193- | 6 |
| 69.1 | | NNNNNGCTGAGTGC | | GCCAAGGGGTGAG | 168937224 | |
| | | TGG | | TGCTGG | | |
| WP_1261239 | 503 | CCAGCGCTCAGANNN | 1110 | CCAGAGCACAGAG | chr5:168937193- | 6 |
| 82.1 | | NNNNNGCTGAGTGC | | GCCAAGGGGTGAG | 168937224 | |
| | | TGG | | TGCTGG | | |
| WP_1079476 | 504 | TTACCAGTGATANNN | 1111 | TTACCAGTGAAAGA | chr5:17974903- | 6 |
| 08.1 | | NNNNNTATCACTGGT | | AGATAATAAAACTG | 17974934 | |
| | | AG | | GTAG | | |
| WP_0839159 | 505 | GTACAGGTGATANNN | 1112 | GTACAGGTGATACA | chr5:21040341- | 6 |
| 96.1 | | NNNNNNTATCACCTG | | TACTGGATATCCCC | 21040373 | |
| | | TTG | | TGATA | | |
| YP_0038569 | 506 | GCCCTGGTCAGANNN | 1113 | GCCGTGGCCAGAGT | chr5:38448769- | 6 |
| 19.1 | | NNNNNNTCTGACCG | | GTGCAGCTCTGACC | 38448801 | |
| | | GGGC | | TGGGC | | |
| WP_1329781 | 507 | TAACATGGGATANNN | 1114 | TAAAATATGATACC | chr5:45155486- | 5 |
| 17.1 | | NNNNNNTATCCCATG | | TTCAGTGTATCCCAT | 45155518 | |
| | | TTA | | GTTA | | |
| WP_0482200 | 508 | CTTACGAATAGANNN | 1115 | CTTACGAATAAACA | chr5:45667699- | 5 |
| 40.1 | | NNNNAATATTCGTAA | | CAACTAACATTAGT | 45667729 | |
| | | G | | AAG | | |
| WP_0023515 | 509 | AACGGCAAAATANNN | 1116 | AATGGCAAAATAAA | chr5:56153488- | 6 |
| 52.1 | | NNNNNTATTTTGACG | | TGGGGGTATTTTGA | 56153519 | |
| | | TT | | TATT | | |
| ORE41776.1 | 510 | TGAGCACTGATANNN | 1117 | TGAGCACTAATCCC | chr5:68330222- | 8 |
| | | NNNNNNTATCAGTGC | | AAAATCTTATCATTG | 68330254 | |
| | | TTA | | CTTA | | |
| WP_0127298 | 511 | AAGCCCGGTAGANN | 1118 | TAGCCCGGTAGAGG | chr5:81344667- | 6 |
| 69.1 | | NNNNNTCTACCGGGC | | TGAGGTCTTCAGGG | 81344697 | |
| | | TT | | CTT | | |
| WP_1034222 | 512 | CAAGTATCGATANNN | 1119 | TAAGTATCTATATTT | chr6:120945709- | 5 |
| 07.1 | | NNNNNTATCGATATT | | CTATATATAGATATT | 120945740 | |
| | | TA | | TA | | |
| WP_0857349 | 513 | CAAGTATCGATANNN | 1120 | TAAGTATCTATATTT | chr6:120945709- | 5 |
| 74.1 | | NNNNNTATCGATATT | | CTATATATAGATATT | 120945740 | |
| | | TA | | TA | | |
| WP_0486675 | 514 | ATAGTGTGATATANN | 1121 | ATAGTGTAATATAA | chr6:126292077- | 6 |
| 03.1 | | NNNNNNTATATCACA | | TATAAATTATATAAC | 126292110 | |
| | | TTAT | | AATAT | | |
| WP_0764996 | 515 | GGCTTAGCTATANNN | 1122 | GGCTTAGCAATAAA | chr6:130946245- | 6 |
| 65.1 | | NNNNNGTTAGCTAA | | CCTATTGTTACATAA | 130946276 | |
| | | GCC | | GCC | | |
| WP_0458292 | 516 | TAATAGCGAATANNN | 1123 | TAATAGTGAATATG | chr6:133420190- | 6 |
| 69.1 | | NNNNNTATTCGCTAT | | CATTCATATTCACTA | 133420221 | |
| | | TG | | TTA | | |
| KJV34819.1 | 517 | TAATAGCGAATANNN | 1124 | TAATAGTGAATATG | chr6:133420190- | 6 |
| | | NNNNNTATTCGCTAT | | CATTCATATTCACTA | 133420221 | |
| | | TG | | TTA | | |
| WP_0732857 | 518 | TAAGGTATGATANNN | 1125 | GAAGATATTATATT | chr6:134634933- | 4 |
| 21.1 | | NNNNNNTATCATACC | | ATCTGTATATCATAC | 134634965 | |
| | | TTA | | CTTA | | |
| WP_1254233 | 519 | TAAGGTATGATANNN | 1126 | GAAGATATTATATT | chr6:134634933- | 4 |
| 73.1 | | NNNNNNTATCATACC | | ATCTGTATATCATAC | 134634965 | |
| | | TTA | | CTTA | | |
| WP_0355601 | 520 | TAAGGTATGATANNN | 1127 | GAAGATATTATATT | chr6:134634933- | 4 |
| 63.1 | | NNNNNNTATCATACC | | ATCTGTATATCATAC | 134634965 | |
| | | TTA | | CTTA | | |
| WP_1114806 | 521 | TAAGGTATGATANNN | 1128 | GAAGATATTATATT | chr6:134634933- | 4 |
| 23.1 | | NNNNNNTATCATACC | | ATCTGTATATCATAC | 134634965 | |
| | | TTA | | CTTA | | |
| WP_1254406 | 522 | TAAGGTATGATANNN | 1129 | GAAGATATTATATT | chr6:134634933- | 4 |
| 09.1 | | NNNNNNTATCATACC | | ATCTGTATATCATAC | 134634965 | |
| | | TTA | | CTTA | | |
| WP_0652356 | 523 | TTGGGATAGATANNN | 1130 | CTGAGATATATATA | chr6:146027378- | 4 |
| 45.1 | | NNNNNTATCTACCCC | | CAAAGATATCTACC | 146027409 | |
| | | AA | | CCAA | | |
| WP_0094081 | 524 | AGAGAGTAGATANN | 1131 | AGAGAGTATATATA | chr6:152603807- | 6 |
| 53.1 | | NNNNNNGATCTACTC | | TATATAGATATACT | 152603838 | |
| | | TCT | | ATCT | | |
| WP_1332888 | 525 | TAACACACCATANNN | 1132 | AAACACACCATATT | chr6:152964488- | 7 |
| 65.1 | | NNNNNNTATAGCGT | | CCCTTCATAGAGCG | 152964520 | |
| | | GTTA | | TATTA | | |
| WP_0114150 | 526 | AGACATGTGATANNN | 1133 | GGACAAGTGTTATT | chr6:153314283- | 6 |
| 80.1 | | NNNNNNTATCACATG | | TAATTCCTATCACAT | 153314315 | |
| | | TTG | | GTTG | | |
| YP_239821.1 | 527 | TATCCCTTGATANNN | 1134 | AATCCCTTGAAATT | chr6:22061867- | 4 |
| | | NNNNNNTTTCAAGG | | GTCAGTATTTCAAG | 22061899 | |
| | | GGTA | | GGTTA | | |
| WP_0186216 | 528 | TTATCTACGATANNN | 1135 | TTATCTAGGATAGG | chr6:25581730- | 5 |
| 39.1 | | NNNNNNTATCGTAG | | AAATCCTTATTCTAG | 25581762 | |
| | | ATAA | | ATAA | | |
| WP_0262423 | 529 | CTATGTCCGATANNN | 1136 | CTATGTCCGATTTCT | chr6:30376959- | 5 |
| 20.1 | | NNNNNNTATCGGAC | | TCTCATTATTGGACT | 30376991 | |
| | | ATAA | | TAA | | |
| AVC45611.1 | 530 | CTATGTCCGATANNN | 1137 | CTATGTCCGATTTCT | chr6:30376959- | 5 |
| | | NNNNNNTATCGGAC | | TCTCATTATTGGACT | 30376991 | |
| | | ATAA | | TAA | | |
| WP_0154946 | 531 | TTATGTCCGATANNN | 1138 | CTATGTCCGATTTCT | chr6:30376959- | 5 |
| 05.1 | | NNNNNNTATTGGAC | | TCTCATTATTGGACT | 30376991 | |
| | | GTAA | | TAA | | |
| WP_0056103 | 532 | TTATGTCCGATANNN | 1139 | CTATGTCCGATTTCT | chr6:30376959- | 5 |
| 02.1 | | NNNNNNTATTGGAC | | TCTCATTATTGGACT | 30376991 | |
| | | GTAA | | TAA | | |
| WP_0932201 | 533 | TCACACGGGATANNN | 1140 | TCTCACAGGATACT | chr6:44113713- | 7 |
| 83.1 | | NNNNNNTACCCCGTG | | ACACTGTTACCCAG | 44113745 | |
| | | TGA | | TGTGA | | |
| WP_0655408 | 534 | AAAAACCACAGANNN | 1141 | AAAAACAACAGAAC | chr6:45110522- | 5 |
| 14.1 | | NNNNNTCTGTGGTTT | | CCCTTTTCAGTGCTT | 45110553 | |
| | | CT | | TCT | | |
| WP_0445439 | 535 | TATTGATGGATANNN | 1142 | TATTGATGGAAATT | chr6:48808288- | 4 |
| 06.1 | | NNNNNTATCCATCAA | | CTGCAATATCCATCC | 48808319 | |
| | | CC | | AAC | | |
| WP_0343966 | 536 | AAAGCCCGCAGANN | 1143 | AAAAGCCGCAGAG | chr6:71263114- | 6 |
| 20.1 | | NNNNNNCCTGCGGG | | GGCTCAGCCTGCCG | 71263145 | |
| | | CTTT | | GCTTT | | |
| WP_0484445 | 537 | TTATGACCGATANNN | 1144 | TTATGACGGATAAC | chr6:78996573- | 7 |
| 47.1 | | NNNNNTATCGGTCAT | | TGGGCATATTTGTC | 78996604 | |
| | | AA | | ATAA | | |
| WP_0034997 | 538 | TGGTACAACATANNN | 1145 | AGGTACAATATAAG | chr6:82026247- | 6 |
| 34.1 | | NNNNNTATGTTGTAT | | CCAAGATATGTTTT | 82026278 | |
| | | AA | | ATAA | | |
| WP_0010669 | 539 | TAGCATGTTACANNN | 1146 | TAGCAAGTTAAAGT | chr6:85617220- | 7 |
| 53.1 | | NNNNAGTAACATGCC | | ACGAAAGTAACATG | 85617250 | |
| | | A | | CAA | | |
| WP_0010669 | 540 | TAGCATGTTACANNN | 1147 | TAGCAAGTTAAAGT | chr6:85617220- | 7 |
| 42.1 | | NNNNAGTAACATGCC | | ACGAAAGTAACATG | 85617250 | |
| | | A | | CAA | | |
| WP_0154697 | 541 | ACCCCAATAAGANNN | 1148 | ACCCCAATGAGAAA | chr6:87787506- | 6 |
| 49.1 | | NNNNNTCTTGTTGGG | | ATACTTTCTCGTTGG | 87787537 | |
| | | GT | | GGA | | |
| WP_0121873 | 542 | ATATGTCCGATANNN | 1149 | ATATGTCTGACATTC | chr6:95103635- | 7 |
| 69.1 | | NNNNNNTATTGGAC | | CTTAGGTATTGGAC | 95103667 | |
| | | ATAG | | ATAA | | |
| WP_0565151 | 543 | GCTATGTTTTACANN | 1150 | AATATGTTTTACATT | chr7:106052119- | 5 |
| 34.1 | | NNNNNNNAATAAAA | | ACAACACAATATAA | 106052153 | |
| | | CATAGC | | CATAGC | | |
| WP_0514720 | 544 | CAAGTAGCGATANNN | 1151 | GAAGTAGAAATAG | chr7:116214710- | 8 |
| 36.1 | | NNNNNTATTGCTACT | | GAATTTATATTGCTA | 116214741 | |
| | | GG | | CTGG | | |
| WP_0163917 | 545 | CACCACTCCAGANNN | 1152 | CACCACTGCAGACT | chr7:125316538- | 5 |
| 64.1 | | NNNNNNTCTGGAGT | | GAAGTGCTCTGGTG | 125316570 | |
| | | GGTC | | TGGTA | | |
| WP_0529591 | 546 | TGTGATTCCATANNN | 1153 | TGTGAGTTCATACA | chr7:152786802- | 5 |
| 63.1 | | NNNNNNTATGGAAT | | TTTCCAATATGGTAT | 152786834 | |
| | | CACA | | CACA | | |
| AGC72343.1 | 547 | TAGCTTATGATANNN | 1154 | TAGCTTAAAATAGA | chr7:80489324- | 6 |
| | | NNNNNTATCAAAAG | | TTTACCTATCAAAA | 80489355 | |
| | | GTA | | GCTA | | |
| WP_1173167 | 548 | TAACCAACGATANNN | 1155 | TAACTAACAATATTC | chr7:81194736- | 5 |
| 04.1 | | NNNNNTATCGAAGG | | TTATTTATCGAAGTT | 81194767 | |
| | | TTA | | TA | | |
| WP_0207447 | 549 | TAACCAACGATANNN | 1156 | TAACTAACAATATTC | chr7:81194736- | 5 |
| 56.1 | | NNNNNTATCGAAGG | | TTATTTATCGAAGTT | 81194767 | |
| | | TTA | | TA | | |
| WP_0174370 | 550 | GGGCTACTAATANNN | 1157 | GGGCTACTTATAGA | chr7:82506117- | 3 |
| 96.1 | | NNNNNNATTTAGTAG | | ATTCTATATTTACTA | 82506149 | |
| | | CCC | | GACC | | |
| WP_0542920 | 551 | GAATTCATGCATANN | 1158 | GAATTAATGCATAG | chr7:8610238- | 7 |
| 66.1 | | NNNNNNTATGCATG | | GTTGATATATGCAG | 8610271 | |
| | | AAACC | | AAAACC | | |
| WP_0128621 | 552 | CATCAAACAATANNN | 1159 | AATCATACAATATA | chr7:86573735- | 5 |
| 44.1 | | NNNNTATTGCTTAAT | | TGACATATTGCTTA | 86573765 | |
| | | G | | ATT | | |
| WP_0226843 | 553 | GGATATGTGATANNN | 1160 | GGATATGTGATTAC | chr7:86824639- | 7 |
| 52.1 | | NNNNNTATCACATGT | | CATAATTCTCACATG | 86824670 | |
| | | TC | | TAC | | |
| WP_0767979 | 554 | GGTGTGCACAGANN | 1161 | GATGTGCAAAAACT | chr7:91397008- | 5 |
| 08.1 | | NNNNNNNTTTGTGCA | | TTGGCATTTTGTGC | 91397040 | |
| | | CACC | | ACACC | | |
| WP_0974526 | 555 | CTAACTTTAAATANN | 1162 | CTAACTTAAATTTTA | chr8:112961297- | 7 |
| 09.1 | | NNNNNNTATTTAAAG | | CTTTTCTATTTAAAG | 112961330 | |
| | | TTAG | | TTAG | | |
| WP_0162624 | 556 | CTAACTTTAAATANN | 1163 | CTAACTTAAATTTTA | chr8:112961297- | 7 |
| 25.1 | | NNNNNNTATTTAAAG | | CTTTTCTATTTAAAG | 112961330 | |
| | | TTAG | | TTAG | | |
| WP_0775433 | 557 | CTAACTTTAAATANN | 1164 | CTAACTTAAATTTTA | chr8:112961297- | 7 |
| 56.1 | | NNNNNNTATTTAAAG | | CTTTTCTATTTAAAG | 112961330 | |
| | | TTAG | | TTAG | | |
| WP_0321528 | 558 | CTAACTTTAAATANN | 1165 | CTAACTTAAATTTTA | chr8:112961297- | 7 |
| 54.1 | | NNNNNNTATTTAAAG | | CTTTTCTATTTAAAG | 112961330 | |
| | | TTAG | | TTAG | | |
| WP_0131603 | 559 | GCCCTGGTGAGANNN | 1166 | GCCCTGGTGAGAGT | chr8:143044855- | 6 |
| 48.1 | | NNNNTCTCACCAGGG | | CCCATGCCCACAAG | 143044885 | |
| | | C | | GGC | | |
| EHJ58476.1 | 560 | AGGGTGTTGATANNN | 1167 | ATGGTGATGATAAT | chr8:24207531- | 5 |
| | | NNNNNNTATCAACAC | | AATTCCTAATCAAC | 24207563 | |
| | | TGT | | ACTGT | | |
| WP_0398585 | 561 | AGGGTGTTGATANNN | 1168 | ATGGTGATGATAAT | chr8:24207531- | 5 |
| 63.1 | | NNNNNNTATCAACAC | | AATTCCTAATCAAC | 24207563 | |
| | | TGT | | ACTGT | | |
| WP_0535590 | 562 | ATCCCCCAGATANNN | 1169 | ATCTCCCAGATGAT | chr8:24330870- | 6 |
| 35.1 | | NNNNNNTATCTGGG | | CTAAGATTATCTGG | 24330902 | |
| | | GAAG | | AGAAG | | |
| SEC15746.1 | 563 | CAATGTCCGATANNN | 1170 | CAATCTCCTATACTT | chr8:32597229- | 8 |
| | | NNNNNNTATCGGAC | | TGATTTTATAGGAC | 32597261 | |
| | | ATTA | | ATTA | | |
| WP_0903301 | 564 | CAATGTCCGATANNN | 1171 | CAATCTCCTATACTT | chr8:32597229- | 8 |
| 26.1 | | NNNNNNTATCGGAC | | TGATTTTATAGGAC | 32597261 | |
| | | ATTA | | ATTA | | |
| WP_0250314 | 565 | CAATGTCCGATANNN | 1172 | CAATCTCCTATACTT | chr8:32597229- | 8 |
| 21.1 | | NNNNNNTATCGGAC | | TGATTTTATAGGAC | 32597261 | |
| | | ATTA | | ATTA | | |
| WP_0701745 | 566 | GCCCGCCTGAGANNN | 1173 | GTCTGCCTGAGAGG | chr8:40628155- | 6 |
| 36.1 | | NNNNNACTCAAGCG | | GTATAAACTCAAGA | 40628186 | |
| | | GGC | | GGGC | | |
| WP_0393287 | 567 | TAACTTCATATANNN | 1174 | TACATTTATATATAA | chr8:62042573- | 7 |
| 73.1 | | NNNNNTATATGAAGT | | ATGTATATATGAAG | 62042604 | |
| | | TG | | TTG | | |
| WP_1050800 | 568 | TAACTTCATATANNN | 1175 | TACATTTATATATAA | chr8:62042573- | 7 |
| 92.1 | | NNNNNTATATGAAGT | | ATGTATATATGAAG | 62042604 | |
| | | TG | | TTG | | |
| WP_0425961 | 569 | TTTGTATGTCTATANN | 1176 | TTTGTATGTATATAC | chr8:62870333- | 6 |
| 86.1 | | NNNNNNNTATAGAT | | ACAAAATATATGCA | 62870369 | |
| | | ATACTAA | | TATACTAA | | |
| WP_1132334 | 570 | TCACTATCGATANNN | 1177 | TCAATATCTATATAT | chr8:68696565- | 5 |
| 96.1 | | NNNNNNTATCGATA | | AGTTTATATCTATAG | 68696597 | |
| | | GTGA | | TGA | | |
| WP_1108804 | 571 | TCACTATCGATANNN | 1178 | TCAATATCTATATAT | chr8:68696565- | 5 |
| 04.1 | | NNNNNNTATCGATA | | AGTTTATATCTATAG | 68696597 | |
| | | GTGA | | TGA | | |
| WP_1200192 | 572 | TCACTATCGATANNN | 1179 | TCAATATCTATATAT | chr8:68696565- | 5 |
| 18.1 | | NNNNNNTATCGATA | | AGTTTATATCTATAG | 68696597 | |
| | | GTGA | | TGA | | |
| WP_0696942 | 573 | TCACTATCGATANNN | 1180 | TCAATATCTATATAT | chr8:68696565- | 5 |
| 92.1 | | NNNNNNTATCGATA | | AGTTTATATCTATAG | 68696597 | |
| | | GTGA | | TGA | | |
| WP_0921773 | 574 | TCACTATCGATANNN | 1181 | TCAATATCTATATAT | chr8:68696565- | 5 |
| 45.1 | | NNNNNNTATCGATA | | AGTTTATATCTATAG | 68696597 | |
| | | GTGA | | TGA | | |
| WP_0571937 | 575 | TCACTATCGATANNN | 1182 | TCAATATCTATATAT | chr8:68696565- | 5 |
| 06.1 | | NNNNNNTATCGATA | | AGTTTATATCTATAG | 68696597 | |
| | | GTGA | | TGA | | |
| WP_1335653 | 576 | TCACTATCGATANNN | 1183 | TCAATATCTATATAT | chr8:68696565- | 5 |
| 15.1 | | NNNNNNTATCGATA | | AGTTTATATCTATAG | 68696597 | |
| | | GTGA | | TGA | | |
| KSV89580.1 | 577 | TCACTATCGATANNN | 1184 | TCAATATCTATATAT | chr8:68696565- | 5 |
| | | NNNNNNTATCGATA | | AGTTTATATCTATAG | 68696597 | |
| | | GTGA | | TGA | | |
| WP_0583233 | 578 | TCACTATCGATANNN | 1185 | TCAATATCTATATAT | chr8:68696565- | 5 |
| 47.1 | | NNNNNNTATCGATA | | AGTTTATATCTATAG | 68696597 | |
| | | GTGA | | TGA | | |
| WP_1326658 | 579 | TCACTATCGATANNN | 1186 | TCAATATCTATATAT | chr8:68696565- | 5 |
| 65.1 | | NNNNNNTATCGATA | | AGTTTATATCTATAG | 68696597 | |
| | | GTGA | | TGA | | |
| WP_0696942 | 580 | TCACTATCGATANNN | 1187 | TCAATATCTATATAT | chr8:68696565- | 5 |
| 93.1 | | NNNNNNTATCGATA | | AGTTTATATCTATAG | 68696597 | |
| | | GTGA | | TGA | | |
| RWE07715.1 | 581 | TCACTATCGATANNN | 1188 | TCAATATCTATATAT | chr8:68696565- | 5 |
| | | NNNNNNTATCGATA | | AGTTTATATCTATAG | 68696597 | |
| | | GTGA | | TGA | | |
| WP_0115788 | 582 | TCACTATCGATANNN | 1189 | TCAATATCTATATAT | chr8:68696565- | 5 |
| 06.1 | | NNNNNNTATCGATA | | AGTTTATATCTATAG | 68696597 | |
| | | GTGA | | TGA | | |
| RWD51833.1 | 583 | TCACTATCGATANNN | 1190 | TCAATATCTATATAT | chr8:68696565- | 5 |
| | | NNNNNNTATCGATA | | AGTTTATATCTATAG | 68696597 | |
| | | GTGA | | TGA | | |
| WP_0964596 | 584 | TCACTATCGATANNN | 1191 | TCAATATCTATATAT | chr8:68696565- | 5 |
| 80.1 | | NNNNNNTATCGATA | | AGTTTATATCTATAG | 68696597 | |
| | | GTGA | | TGA | | |
| RWD87033.1 | 585 | TCACTATCGATANNN | 1192 | TCAATATCTATATAT | chr8:68696565- | 5 |
| | | NNNNNNTATCGATA | | AGTTTATATCTATAG | 68696597 | |
| | | GTGA | | TGA | | |
| WP_0162108 | 586 | CTACTTCCGATANNN | 1193 | CTACTTCAGATATA | chr8:92445006- | 7 |
| 37.1 | | NNNNNTATCGGAAG | | ACAAAATATCCGAA | 92445037 | |
| | | TAA | | GAAA | | |
| WP_0732881 | 587 | TAAGTTATGATANNN | 1194 | TAAGTTATGATAAT | chr9:102580364- | 5 |
| 06.1 | | NNNNNNTATCATAAC | | AGAAGTTTATAATT | 102580396 | |
| | | TTA | | ACTTG | | |
| WP_0927431 | 588 | TAAGTTATGATANNN | 1195 | TAAGTTATGATAAT | chr9:102580364- | 5 |
| 58.1 | | NNNNNNTATCATAAC | | AGAAGTTTATAATT | 102580396 | |
| | | TTA | | ACTTG | | |
| WP_0263515 | 589 | TAAGTTATGATANNN | 1196 | TAAGTTATGATAAT | chr9:102580364- | 5 |
| 76.1 | | NNNNNNTATCATAAC | | AGAAGTTTATAATT | 102580396 | |
| | | TTA | | ACTTG | | |
| WP_0893342 | 590 | TAAGTTATGATANNN | 1197 | TAAGTTATGATAAT | chr9:102580364- | 5 |
| 12.1 | | NNNNNNTATCATAAC | | AGAAGTTTATAATT | 102580396 | |
| | | TTA | | ACTTG | | |
| WP_0865970 | 591 | TAAGTTATGATANNN | 1198 | TAAGTTATGATAAT | chr9:102580364- | 5 |
| 10.1 | | NNNNNNTATCATAAC | | AGAAGTTTATAATT | 102580396 | |
| | | TTA | | ACTTG | | |
| WP_0925112 | 592 | TAACATAGGATANNN | 1199 | TAACATGAGATAAG | chr9:124694620- | 6 |
| 77.1 | | NNNNNTATCCCATGT | | CCACTAAATCCCAT | 124694651 | |
| | | TA | | GTTA | | |
| WP_0557393 | 593 | GGCTTAGGGATANNN | 1200 | GGTTTAGGGATACA | chr9:1707914- | 6 |
| 75.1 | | NNNNTATCTCTAAGC | | TGGGCAGTCTCTAA | 1707944 | |
| | | C | | GCC | | |
| WP_0580665 | 594 | TTTGTGGGGTAGANN | 1201 | TTTGTGGGGCAGG | chr9:1996891- | 4 |
| 17.1 | | NNNNNNTCTGCCCCA | | GAGATTTTCCTGCC | 1996924 | |
| | | CAAA | | CCACAAA | | |
| WP_0021875 | 595 | AATTACCGAATANNN | 1202 | AATTACAGAAGAGG | chr9:20409384- | 3 |
| 15.1 | | NNNNNNTATTTGGTT | | TGAAAGATATTTGG | 20409416 | |
| | | ATT | | TTTTT | | |
| WP_1276221 | 596 | TGACTATCGATANNN | 1203 | TGACTATCCATAAA | chr9:30689863- | 5 |
| 66.1 | | NNNNNNTATCGATA | | GAGGCTATAGCGAT | 30689895 | |
| | | GTGA | | AGAGA | | |
| WP_1012009 | 597 | ATTATTCTAGATANN | 1204 | ATTATTATAGTTACA | chr9:42127049- | 3 |
| 24.1 | | NNNNNNTATCTGGA | | TAGTTTTATCTGGA | 42127082 | |
| | | ATAAT | | AGAAT | | |
| WP_0683316 | 598 | TAGGTAGCGATANNN | 1205 | TATGTGGCTATATTT | chr9:7299781- | 6 |
| 37.1 | | NNNNNNTATCACTAC | | GTTTTCTATCACTAC | 7299813 | |
| | | CTA | | CTA | | |
| WP_0232747 | 599 | GCTTGTAAAATANNN | 1206 | CCTTGTAAAATATG | chr9:83685793- | 6 |
| 85.1 | | NNNNNNTATCTTACA | | AAATGGTTATCTGA | 83685825 | |
| | | AGC | | CAATC | | |
| WP_0184094 | 600 | CCATGTCCGATANNN | 1207 | CCATTTCAGATAGA | chrX:109132372- | 6 |
| 63.1 | | NNNNNNTATCGGAC | | GAACATGTATTGGA | 109132404 | |
| | | ATGA | | CATGA | | |
| WP_0103052 | 601 | GACTTATCTAATANN | 1208 | GACTTATTTAATAA | chrX:123330942- | 6 |
| 36.1 | | NNNNNNTATTAAATA | | ATAGACTTATTTAAT | 123330975 | |
| | | AATC | | AAATA | | |
| WP_0087370 | 602 | GTGGTGGGCAGANN | 1209 | ATGGTGGGCATAG | chrX:123955891- | 6 |
| 17.1 | | NNNNNNNTTTGCCCA | | GACTATTGTATGCC | 123955923 | |
| | | CCAT | | CACCAT | | |
| WP_0065260 | 603 | TTGAGTGTTACANNN | 1210 | TTAAGTGTTACACA | chrX:140388413- | 7 |
| 94.1 | | NNNNNNTGTTACACT | | TATTTTATTTTACCC | 140388445 | |
| | | CAC | | TCAC | | |
| WP_1276571 | 604 | TAAGATACGATANNN | 1211 | TAACATGCGATATA | chrX:15022673- | 5 |
| 23.1 | | NNNNNNTATCGTATC | | TACTATATATCGTAT | 15022705 | |
| | | TAA | | ATAA | | |
| WP_0718572 | 605 | AGCTCCTTTATANNN | 1212 | AGCTCCTCTATGATT | chrX:16696196- | 6 |
| 25.1 | | NNNNNTATAAATCAG | | AAAACTAAAAATCA | 16696227 | |
| | | CT | | GCT | | |
| WP_1076761 | 606 | TCACTAGCGATANNN | 1213 | TCACTAGAGATAGA | chrX:21966067- | 5 |
| 28.1 | | NNNNTATCGATAGTG | | CTCTTTATGCATAGT | 21966097 | |
| | | A | | GA | | |
| WP_0031322 | 607 | AAGTTACTGACANNN | 1214 | AAGTTACTGAGATG | chrX:41824012- | 6 |
| 98.1 | | NNNNTGTCAGTAACT | | CAAGATGTCAAAAA | 41824042 | |
| | | C | | CTC | | |

[0097] Non-limiting examples of amino acid sequences of tyrosine recombinases are provided in Table 1, column 1 by accession number. Table 1 further provides, in column 2, exemplary native non-human (e.g., bacterial, viral, or archaeal) recognition sequence(s) to which a given exemplary tyrosine recombinase binds. Each of the native recognition sequences listed in Table 1 typically comprises three segments: (i) a first parapalindromic sequence, (ii) a spacer (e.g., a core sequence) that generally does not include a defined nucleic acid sequence, and (iii) a second parapalindromic sequence, wherein the first and second paralindromic sequences are parapalindromic relative to each other. Table 1 further provides, in column 3, exemplary recognition sequence(s) for each exemplary tyrosine recombinase in the human genome. Generally, the human recognition sequences listed in column 3 of Table 1 each comprises three segments: (i) a first parapalindromic sequence, (ii) a spacer (e.g., a core sequence) that generally includes a defined nucleic acid sequence, and (iii) a second parapalindromic sequence, wherein the first and second paralindromic sequences are parapalindromic relative to each other. Table 1 includes, in column 4, genomic locations of the exemplary human recognition sequences in the human genome.

TABLE 2
Amino acid sequences of the tyrosine recombinases of Table 1.

| SEQ | |
|---|---|
| ID | |
| NO: | Bidirectional Tyrosine Recombinase |
| 1215 | WP_006717173.1 |
| | MAKKVKPLVDTEIKKAKASDKPYTLTDGYGLFLIISPTGSKSWRFNYYRPLTKKRAKIALGVYPAITLSK |
| | ARELREQYRQLLALKIDPQEHIKQNELLQLQRQQNTFFAIATQWKQKKVSEIKEATLKSRWRTIEKYVFP |
| | YLGDNPIADITPQQLHDIAMPLFERGVSHTGKLVIALVNEIMGFAVNKGVIEFNKCVNVSKAFNVNRTTH |
| | HPTIRPEQLPEFMSALRNSHIDLMVKYLIEFSLLTMTRPSEAANALWDEIDFEKSLWNIPAERMKMKKAF |
| | TVPLSPQVLKILNKLKNISGRSRFIFOSQRYPERSLHSSSANAAIKRVGYKDQLTSHGLRSIASTYLSET |
| | FTEMNLEILEACLSHQSKNQVRNAYNRSTYLEQRKLLMNAWGNFVEECMKKSI |
| 1216 | WP_006718580.1 |
| | MLTDTKIKSLKPKDKVYKVADRDGLYVSVSTAGTITFRYDYRINGRRETLTIGKYGADGINLAEARERLM |
| | IARKQVSEGISPATEKRAERNKIRNADRFCVFAEKYLADVQLADSTKALRVATYERDIKDTFGNRLMTEI |
| | TADEIRSHCEKIKERGAPSTAIFVRDLIANVYRYAIQRGHKFANPADEIANSSIATFKKRERVLTPREIK |
| | LFFNTLEETQSDFALKKAVKFILLTMVRKGELVNATWNEVDFKNKVWTIPAERMKAKRAHNVYLSEQALD |
| | LIIAFQIYSEGSPYLLPGRINRRQPIANSSLNRVIANCIKFINKDEQRIDEFTVHDLRRTGSTLLHEMGE |
| | NSDWIEKSLAHEQQGVRAVYNKAEYAEQRKEMMQRWADQVDEWINDNSL |
| 1217 | WP_006719234.1 |
| | MPKITKPLTNTEVERSKPKAKEYTLTDGYGLFLLVLPTGVKSWRFNYIRPLTKKRTKVSLGTYPALSLAQ |
| | ARSIREEYRSLLAQGIDPQEHKEQEQKAAIEHIENSLLSVANRWKAKKVQKVEAETLKKDWRRMEIYLFP |
| | FIGDMPINEILPKVVIEALESLYNQGKGDTLKRTIRLLNEVLNFAVNYGLIAFNPCLRINEVFNFGKSTN |
| | NPAITPKELPELIKAVMYSSAAIQTKLLFKFQLLTMVRPAEASNATWSEIDFKKSLWTIPANRMKKRHPF |
| | VIPLSSQAMAILNKMKSISVKSEYVFQSWIKSNQPMSSQTINKMLVDLGYKNKQTAHGLRTIGHTYLADL |
| | RIDYEVAEMCISHKTGTQTGKIYDRADFLEQRKPVMQLWGDYVEQCER |
| 1218 | WP_109859198.1 |
| | MNDLTLLDLFLNELWIGKGLSPNTVQSYRLDLTALCDWLGERKLSLLDLDSVDLQTFLGERVEQGYKATS |
| | TARLLSAIRKLFQYLYQEKYRTDDPSAVLSSPKLPSRLPKYLTEQQVTDLLNVQSLEQPIELRDKAMLEL |
| | LYATGLRVTELVSLHTDSISLNQGVVRVIGKGNKERIVPMGEEATHWVKQFMLFARPILLDGQSSDVLFP |
| | SRRGTOMTRQTFWHRIKHYAVLAEIDSNMLSPHVLRHAFATHLVNHGADLRVVOMLLGHSDLSTTQIYTH |
| | VAKERLKRLHERYHPRG |
| 1219 | WP_006717195.1 |
| | MNDLTLLDLFLNELWIGKGLSPNTVQSYRLDLTALCDWLSERKLSLLDLDSVDLQTFLGERVEQGYKATS |
| | TARLLSAIRKLFQYLYQEKYRTDDPSAVLSSPKLPSRLPKYLTEQQVTDLLNVQSLEQPIELRDKAMLEL |
| | LYATGLRVTELVSLHTDSISLNQGVVRVIGKGNKERIVPMGEEATHWVKQFMLFARPILLNGQSSDVLFP |
| | SRRGTQMTRQTFWHRIKHYAVLAEIDSNMLSPHVLRHAFATHLVNHGADLRVVQMLLGHSDLSTTQIYTH |
| | VAKERLKRLHERYHPRG |
| 1220 | WP_005715799.1 |
| | MQNELQKYLTYLRIERQVSPHTLTNYQHQLVRVIAILQDAGIQQWQQVTLSVVRYVLAQSSKQDGLKEKS |
| | LALRLSALRRFLSYLVYQGQLKVNPAVGVSAPKQPKHLPKNIDRDQIQLLLANDSKEPIDIRDRAMIELF |
| | YSSGLRLSELQGLNLNSINLRVREVRVIGKGNKERIVPLGRYASHAIQQWLKVRLLFNPKDDALFVSQLG |
| | NRMSTRTIQMRLERWGIRQGLNSHLNPHKLRHSFATHMLEASSDLRAVQELLGHSHLSTTQIYTHLNFQH |
| | LADVYDAAHPRAKRKK |
| 1221 | WP_120166565.1 |
| | MESIVLKFIEYLKNEKELSKNTIESYNRDLRQFKEYISDNKINDITGVNKTAIIKYLMHLQKIGKSTSTV |
| | SRNLASLRSFYQYLLNKGIINQDPTLNLQSPKPEKKLPDILTPKEVDILLRQPDITTSKGIRDKAMLELL |
| | YASGIRVSELIDLNLEDINLDLGYLVCSKNNSNERIIPIGKIALNILKTYIKDYRKKFIKDKNVKSLFVN |
| | YHGNKMTRQGFWKIVKSYAKKANINKKITPHTLRHSFATHLLQNGADLKSVQEMLGHSDISTTQVYAQIT |
| | KNNIKEVYKKAHPRA |
| 1222 | WP_061329756.1 |
| | MRVQEVKLENNQRRYLLVDDIGLPVIPVAKYLKYIDNSGKSFNTQKTYCYSLKLYFEYLQEIAVDYRSVN |
| | INILSDFVGWLRNPYANNKVVNLKPTIAKRTEKTVNLTVTVVTNFYDYLYRTEELNNDMIDKLMKQVFTG |
| | GNKHYKDFLYHINKDKPTNKNILKIKEPRRKIKVLTKEEIQSVYNATTNIRDEFLIKLLFEAGLRMGEAL |
| | SLFIEDIIFDHNNGHRIRLVNRGELPNGARLKTGEREIHISQELIDLFDDYAYDILDELEIDTNFVFVKL |
| | RGKNKGTPLEYQDVSDLFKRLKKKTGIDVHAHLLRHTHATIYYQTTKDIKQVQERLGHSQIQTTMNMYLH |
| | PSDEDMRANWEIAQPSFKITKRGTNDN |
| 1223 | WP_010497271.1 |
| | MSVIKNFPAHAKPYQATYTNGSGRGRIRKIKSFVSSKDAQLWLKQMETNFINGETYAKSQMLFVDYFQEW |
| | YRLYKAPVVSPPTLDSYYNSWRHFKEHGLGHVKMENLTRDKIQTYLNDLAYAKETTRKDLNHLRACLRDA |
| | YDDGVISRNPAAGTLHVIADPAKSKSKDRKFMAETDFRKVQDFLLNYNYRLSDVNRAVLLVISQTALRVG |
| | EALALRYDDLNQLNCTIRVDESWDAKHLMFGKPKTESGYRTIPVSRQAMKKIITWQNFHRRELFRRGIPN |
| | PGNLLFLNRQKNLPRASAINSCYHQLQLRLGIEAKFSTHTMRHTLASILLGSGEVSIQYISYFLGHANVA |
| | ITQKYYIGLLPEQVEKEDQEVVKIVGAL |
| 1224 | WP_038150996.1 |
| | MASYSISTRQKDKNWQVIVSYKDRYGRWRQKSKQGFLTKRTAKDYGDIIVKEIKENLLLTNNEELANITF |
| | LEFSKIYFNDVKDTLRANSLITYQNLIKYVSPLYNLQLHEITPLIINTTLKNITSSTTSKKFIVSILKRI |
| | FSHAIKEYNLLSKNPVTATVPSEKINKPIRVITNEELDLYYNTISTSNQIYVAIKILQYTGIRIGELFAL |
| | TQDDIDYKEMTISINKQFVTVGKNKNGIGPLKTKNSYRTIPIPKSLAVILSEYTSTCTTDRIITYKSTNA |
| | LRKHIKKHINNHAPHDFRHTYATKLLANGMDVKTVAALLGDTVTTVINTYIHYSDEMRQSAKKDIQRIFD |
| 1225 | WP_038150898.1 |
| | MKLIEKMKGATKRPYVAYKIVGYYRTYDEAVDALQNASKKYTLYQLYTSWLSTHRNSVTSTTISNYHSAI |
| | AHATSIHNTYIDEITYIQLQSIIDTMLRNHLSYSSCKKVRSLLSQLFDYAIINNLISTNYAHYVKIGTNT |
| | PVRPHVTFTTRQINKLWRLSSPLRDIPLILLYTGMRATELINLTSKNVNRKQRTIRITSAKTKAGIRTIP |
| | IHDRIYDIIINRLDSQYVIEECRTYQSLAHQFNQAMKAINAKHTTHDCRHTFATRLDDVGANYNAKRLLL |
| | GHASSNVTDGVYTHKSLVQLRKAIRMLK |
| 1226 | WP_017740000.1 |
| | MRSKKGEVSISLRNGNYQLYWRYKGEKFYLSPGLSESKVNAIAVEKLANQIKLDIIFENFDETLKKYKPE |
| | KTVEKVNKAKKELDIDSRLENYFTVRGIKSKGTKDVYLAVVKRYKSFFYGKKEPNLTDLQKFLEHLKNEG |
| | LSLVTIKSYLIKLAAVFDNTEPWKIIKKQIKPNPVQPKPFTKEEVFSIIENCPEHYRNFVKFLFYSGCRI |
| | GEAINLKWENVTEDFSSVWILADKTKKARKLILTEELKAVIRDSKDKAKSNIYVFTAKTRKSEQVSRKYF |
| | CDYIWKPLLIKLNISYRKPYYTRATMISHSLEAGLSPLKLAKITGHSQSTMWNHYYADLGIENKIPDIFN |
| | QE |
| 1227 | WP_017744257.1 |
| | MHIVTFKGRIRFNLPRQWFGGKQQQWNLKLEATEVNMALASRVARRLEMDFQDGKLTVALPDGSTAFNKE |
| | HYNKVLAEYNIEGNLRTDLKLITGGLPSDEIPPKPQMSLLDVWDMYCEHKFKNGKLAKTTYGQYKSQYRN |
| | YLISAMEANGGEDAIKIKNWLLENRNREIVCKILSGLEQAYKVALRQKLVSFNPYEGIMEDVSRIKRETE |
| | IDVTKESDEDLLNKSKAYTWDEAQVIMEYLKDSPSYGHWYHFVAFKFLTGCRTGEAIGLCWMDVKWDGQC |
| | VVISKTWTRLKFYKPTKTEKEKRVFPMPVDGELWNLLKSLPQGNPSEPVFKSKNEKMIHIDIFGTAWRGR |
| | ESKRNKGIIPTLIEQGKLSKYLPPYNTRHTFVTHQIFDLGRDEKIVSAWCGHSEAVSSKHYQDIADRASQ |
| | INPELPVNNQQVQQVSNEMDEMRNIIKSLQEQLKTQSEVIASLQEQLKNK |
| 1228 | WP_O17746151.1 |
| | MYETGKPSSRVPKITPRNNNGGIIIRFQYQGKQYSISPGGKYSDKLAIANANKIASQIKTDILAGYFDPT |
| | LEKYQPKVKQPDNVVSINKDVALSLKELWEQYKLAKRASVAETTQKEKWSQIDRCLTKVSPEILNPENAR |
| | LLIPELLKAYSSTTLERIINDIHACSHWAFETGLISINPWRRLKQQLPDKPOSSRTKKAYSRDEVNAIIQ |
| | AFRGDWYCNSKSAFKDSWYADFIEFLFLTGCRPEDAIALTWEQVKERVIVFDKAYSCGVLKSTKNNKARM |
| | FPITPQIRELLDRRLTSVSTIPTKLVFPAQNGNYINLRNFTQRYTKRIIENLVSEGKVKQYLPTYNLRNT |
| | SITHYLRQGVDIATVAALMETSEEMINQHYWSPDDDIINNNVQLPEI |
| 1229 | WP_126045042.1 |
| | MNNFININNDKNSIIVANLQEKVKDYARHAFAKNTIKNYQSDWKIFCTWCESLNINPLNITHNTLIAYIT |
| | FLAEENYKASTIQRKISAIYKYCETKNIHINLQDKEFKIVWQGIRRKIGIVKQGKDPILLKDLEDILQHI |
| | SKNTHMGIRDRALLTFGWFSAMRRSELVKLNWQDISFIKEGIIINIRQSKTDKFGEGQKIAILKRKIFCP |
| | IKHLKAWQKINNNEAVFCSVNKADKVTGIRLSCIDVARITKKHSAKIDFDTSKIAGHSLRRGFVTTAVSS |
| | GIRNHIIMKTTRHKSSKMIDDYTHDNSLLENNATNMIITSNSSSKKFNSILKNYLQFKAAYKLYNKVKTN |
| | IKKLYFFCIPPTL |
| 1230 | XP_012333305.1 |
| | MHHIGKALCFFFILNCMDKTTSFFINKVHIFHLTTFRNGGNLTHIRKKCPNSMGVTVKRKGACLNSHDEE |
| | EAEDIDEAETEDEEEMQEEDELEETSDVDETDASDGRLSPRSTKKVTTGGKRVKAGKIKKRKRKKKTTNA |
| | AKCRTCNKILKPRVKFCVHCGTNVSVEKIKLKKYIEDIYLPLRKEEVSYNTYRVEKGFWNDILPKLGKYE |
| | LHELGPNNWESFLKYLKWKNCSPRTMALYQSTYQQSLKYALYRDYLKSVHNFRKIKNSTIPRRKITPLSP |
| | KEIELLLINSGDMHRAIFALSIGIGLRPSEVLRILWEDVNFEKKEIFIKGQKTKYSNTAIPMTNFAYNEL |
| | VKWWEIEKKPLKGLCFYSETIKNKFNYTNTKTPLKTFKTALKGAAKRAGLEISEDGKKRRIFPYLLRHSF |
| | ATIAATSNPPVPLPVAQAIMRHSSSKMLLDTYTKAGNNIIRDGLDNFKI |
| 1231 | WP_073025039.1 |
| | MAIHKPVALYPTFKELKEIPLDEFPELSSFLSSGPGWRKQSWLWGQEFLSYIGRNKSQHTYTRFRSEIEK |
| | FLLWSFVIKESPCDEFRKTDILDYADFCWKPPQTWISLTNHDKFQPKGDGTYIQNKAWSPYRLVVSKGDN |
| | STPDKKKYRPSQQTLRATFTAIIAFYKYLMDEEYCVGNPAQLAKKDCRHFIKDAQVKDVKRLSEEQWLFL |
| | LETVTAMADDNSRFERNLFLIAALKTLFLRISEFSERPDWIPVMGHFWEDTDKNWWLKVYGKGRKLRDIT |
| | VPSSFMPYLKRYRLYRGMSSLPLDGEKHPIVEKLRGSGGMTARQLSRLVQEVFDHAYETMKKQQGEEIAR |
| | KFREVSTHWLRHTGASLEIERGRALKDLSEDLGHSSMATTDTVYVQSEDRKRAESGKNREV |
| 1232 | WP_007635552.1 |
| | MLLKKPVPLYPPYLDLCDFDFKDYPELKEIFSSNESWWLEQFNWGKVFLNYIGRNKSTHTYDRFRNDVER |
| | FLLWSFIEKKKPIDQLRKTDLLEFADFCWHPPVSWIGTSNQERFKIMNGYSCANEFWFPYKIQAPKSQKT |
| | QFIIDKKKYRPSQQTLSSMFTAIIVFYNYLMAEDFCIGNPAQIAKKDCRHFIIDSQVKEIKRLTGSQWQY |
| | VLDTAVEMADDNPVFERNLFVIVALKTLFLRISELSERTNWSPTMGHFWQDDDENWWLKIFGKSRKIRDI |
| | TVPIDFLPFLERYRISRGLIGLPSSNENLVLVEKIRGQGGMTSRHLRRLVQSVLDQAHENMRTSEGENKA |
| | LKLKEASAHWLRHTGASMEIERGRPLKDISEDLGHASMATTDTVYVQSENKKRAESGKQRKVD |
| 1233 | WP_058958135.1 |
| | MTELVPLTELQMNRSGDIAERLRQFVQDKEAFSPNTWRQLLSVMRICNQWSEENQRSFLPMSADDLRDYL |
| | TFLAESGRASSTVTSHAALISMLHRNAGLPVPNTSPQVFRAMKKINRVAVMSGERAGQAVPFRLSDLLAL |
| | DRQWSGADSLQARRDLAFLHVAYATLLRISELSRLRVRDVMRAGDGRIILDVAWTKTVVQTGGLIKALST |
| | RSTQRLEEWLDASGLSGQPDAYLFTAVHRSGRSLPAEKPMSTRALEQIFERAWRCAGKAGGVKANKNRYT |
| | GWSGHSARVGAAQDMADKGYPIARIMQEGTWKKPETLMRYIRHVEAHKGAMVEFMEQHADGTLPD |
| 1234 | WP_090967054.1 |
| | MSELVPITSLEASRNSDDITERLRQFVQDKEAFSPNTWRQLLSVMRICNRWSEDNQRSFLPMSAEDLRDY |
| | LSFLAESGRASSTITSHAALLSMLHRNAGLPVPNVSPLVFRTMKKINRVAVMNGERAGQAVPFRLTDLLA |
| | LDGEWSGSESLQALRDLAFLHVAYATLLRISELSRLRVRDVMRAGDGRIILDVAWTKTIVQTGGLIKALS |
| | ARSTQRLEKWIEASGLFSQPDAYLFSAVHRSGRALIAEKPISTRALEQIFSRAWLTAGKSGAVKANKNRY |
| | TGWSGHSARVGAAQDMADKGYPIARIMQEGTWKKPETLMRYIRHVDAHKGAMVEFMEQHADTDFPG |
| 1235 | WP_010365336.1 |
| | MLSPLVDTLKQLRYQIAHIEDGTLTNEYPELESFLSHVVRSVPNARDDIEFLYQFLYVYGRKSEATFNRF |
| | RNELERFYLWAWEWRALSVFELKREDIEAYVEFVVEPDNRWISDSVQWRFKDHEGLRVVNKLWRPFAFKE |
| | NGVSQQTFSAMFTALNVFYKFAILEEKTFTNFIPVVKKNSPYLIVQSQIKLPDTLSNLQWEYVFGVTRDK |
| | CEENPSLERNLFTLACLKGLYLRISELSERPQWSPVMSHFWQDPDGFWYLRIMGKGNKLRDVTLSEDFII |
| | YLRRYRQYRALPALPRVDEPHPIIHKLRGQGGMNVRQIRRIVQQSFDLAVDSLAADGFSDESEQLKAATA |
| | HWLRHTGATHDAQHRPLKHLSEDLGHAKIATTDQIYIQTNIKDRAKSGSKRKL |
| 1236 | WP_016392893.1 |
| | MARTVTPLSDSKCEAAKPRDKDYKLFDGQGLFLLIKPSGVKTWRFKFIRPDGREGLATFGNYPALGLKAA |
| | RDRRADFLELLAAGRDPIEAGKVAKMDAANARINTFEALARVWHSTCARKWKPHHAATVLRRMELHLFPS |
| | LGARPIADLKARDLLAPLKAAERRDTLETASRLRQYIAGILRMAVQHGIIDINPANDLQGATATRKTAHR |
| | PALPLERLPELLTRMDAYNGRQLTRMAVQLSLLVFTRSSELRFARWDEIDFERALWTIPAERQPIEGVKH |
| | STRGAKMATPHLVPLSRQALALLAEVHQLTGNYELVFAGDHHYWKPMSENTVNAALRRMGYDTKADVCGH |
| | GFRAMACSSLVESGLWSRDAVERQMSHQERNGVRAAYIHKAEHIEERRLMCQWWADYLDASRKKYATPYD |
| | FANCGRDAGNVVSIMRG |
| 1237 | WP_047824597.1 |
| | MAPETALDDDRPDRGEALSLSRDLALVAHGPGAGPSPELLAAYVRAAAPNTLRAFRSDVLAFDAWCRSRG |
| | EKSIPASPQIVADWLSTRASGGAAPASLSRYKASIARLHRLCGLADPTGDELVRLTLAAYRREKGVAQKQ |
| | ARALRFRGAVKDPLSDTPRGINVRAVLASLGDGLTDLRDKALLSLAYDTGLRASELVAVQVEDIGEAIDA |
| | DARLLAIPRSKGDQEGEGATAYLSPRTVRALEAWLKAAVIGEGPVFRRVVVRRYAARQARKARNGKERGW |
| | NARWVPERFAAKDAEPVRIESDVGEGALHPGSITPLIRSMLRRAFDVGAFGDLDAATFEKQVREISAHST |
| | RVGVNQDYFAAGEDLAGIMDALRWKSPRMPLQYNRNLAAEQGAAGRLLGKLR |
| 1238 | WP_046407494.1 |
| | MNALLPFADDVTGSGIVAIDADVIDAARRAMSPNSWRALRADIRVFAGWCAARGLMTLPALPATVATFLA |
| | DQADHGKKAATLARYTASIARLHALADQPDPTRTERVRLELKAQRRALGVRQRQARGLRFRGEVADPLAA |
| | AGPVGVCVEAMLAATGDDLPGQRNRALLSLAFDTGLRRSEIVAIRWPHVERGGAGGGRLFVPRSKADQEG |
| | AGAYAYLSARTMTALGEWRAACGGRSDGALFRRLHRTRDKSGADIWSVGAALSAQSVTLIYRAMLDAAHA |
| | AGLLGMIDSADFDIWRASLTAHSTRVGLTQDLFASGQDLAGIMQALRWKSPAQPARYAQALAVESNAAAK |
| | VVGKL |
| 1239 | WP_003712523.1 |
| | MKQLVLPIKDSNVLHEVQDTLLNNFRFGRRNYTIFQFGKATLLRVSDVLALRRNEIFTDDGLIKKNAYIR |
| | DKKTNKPNILYLKPIKQDLSQYYSWLDENSIHSEWLFPSLKHPERHISEKQFYKEKQFYKIMAKTGDLLN |
| | INYLGTHTMRKTGAYRVYTQTNFNIGLVMSLLNHSSEAMTLKYLGLDQVSREQMLDEVKFD |
| 1240 | WP_005027658.1 |
| | MPLTDTHIRSLKPDVKPRKYFDGGGLFLFVPANGSKLWRMAYRFDGKSKLLSFGEYPTISLKDARERREE |
| | AKRMLSKGIDPSDHKRQLRQARAIAERDSFQNIAREWHETRMAEFSEKHQGTVMYRLETYIFPAIGKTHI |
| | AKLETRDVMEVVKPLEQRGNYETSRRVLQIISQVFRYAVITGRAKHNVAADLRGALRPRKTVHRAAVLEP |
| | EKVGQLLRDIDAYEGYFPLVCALKLAPLVFTRPTELRAAQWKEFDLEAGEWRIPAERMKMRRQHLVPLSR |
| | QAMSILRELQKCSGEGKYLFPSIRTEARSISDATMLNALRRMGYQKHEMSVHGFRSIASTLLNELGYNRD |
| | WIERQLAHGEQDEVRAAYNYAEYLPERRKMMQAWADYLDGLRNTQQKRIREEA |
| 1241 | WP_021170377.1 |
| | MNSNDKDFVLRKNNFIQNNKKLSIKSKKRLQKSKSDNTLRAYEADWMDFYDWCTYHSLQALPAEPETIVN |
| | YINDLADHAKANTVSRRVSAISENHKAAGCVDNNPCRGGLVRNALDAIRREKGTLQRGKAPILMEDLRNI |
| | TAYFDTTDIAGIRDKALLLVGFMGAFRRSELVQIDIEDLTFTQEGVIILVAQSKGDQLGQGAQVAIPYSS |
| | NLDICAVTALKSWIHRANLASGPLFRPVNKYKQIRNRRLTNQSVAIIVKKYTKLSGLNPDNFAGHSLRRG |
| | FATSAAQHDVDERSIMQQTRHKSEKMVRRYIEQGNLFKNNPLNKMF |
| 1242 | WP_015169902.1 |
| | MAKNNRHGQAEILKDLELDRIYRQLQSDSHRLFFNIARYTGERFGAICQLQVCDVYVCYSGIKEPLNEIT |
| | FRAMTRKASPNGERKTRQAYVCDRLREYLSSYRGELGKVYLFPSSIKKDDPITFSAADKWLRTAVDRAGL |
| | EHRGISTHTFRRSFITKLYEEGALDIYAIQQLIGHASILTTQRYLGVSKQKIQSAMNRIYN |
| 1243 | WP_089415106.1 |
| | MSELVPLTPLTVDRNSDITERLRQFVQDKEAFSPNTWRQLLSVMRICNRWSEDNQRSFLPMSADDLRDYL |
| | SFLAESGRASSTVTSHAALISMLHRNAGLPVPNVSPLVFRTMKKINRVAVINGERAGQAVPFRLSDLLAL |
| | DEEWSGSDNLQALRDLAFLHVAYATLLRISELSRLRVRDVMRAGDGRIILDVAWTKTIVQTGGLIKALSA |
| | RSTQRLEEWIEASGLSSQPDAWLFTAVHRSGRPLIAEKPMSTRALEQIFSRAWRTAGKEGAVKANKNRYT |
| | GWSGHSARVGAAQDMADKGYPIARIMQEGTWKKPETLMRYIRHVDAHKGAMVEFMEQYGDPDYPG |
| 1244 | WP_022624268.1 |
| | MSELVPLTPLTVDRNSDITERLRQFVQDKEAFSPNTWRQLLSVMRICNRWSEDNQRSFLPMSADDLRDYL |
| | SFLAESGRASSTVTSHAALISMLHRNAELPVPNVSPLVFRTMKKINRVAVINGERAGQAVPFRLSDLLAL |
| | DKEWSGSDNLQALRDLAFLHVAYATLLRISELSRLRVRDVMRAGDGRIILDVAWTKTIVQTGGLIKALSA |
| | RSTQRLEEWIEASGLSSQPDAWLFTAVHRSGRPLIAEKPMSTRALEQIFSRAWRTAGKEGAVKANKNRYT |
| | GWSGHSARVGAAQDMADKGYPIARIMQEGTWKKPETLMRYIRHVDAHKGAMVEFMEQYGDPDYPG |
| 1245 | WP_046103089.1 |
| | MTELVPLTELQMNRSGDIAERLRQFVQDKEAFSPNTWRQLLSVMRICNQWSEENQRSFLPMSADDLRDYL |
| | TFLAESGRASSTVTSHAALISMLHRNAGLPVPNTSPQVFRAMKKINRVAVMSGERAGQAVPFRLTDLLAL |
| | DRQWSGADSLQARRDLAFLHVAYATLLRISELSRLRVRDVMRAGDGRIILDVAWTKTVVQTGGLIKALST |
| | RSTQRLEEWLDASGLSGQPDAYLFTAVHRSGRSLPAEKPMSTRALEQIFERAWRCAGKAGGVKANKNRYT |
| | GWSGHSARVGAAQDMADKGYPIARIMQEGTWKKPETLMRYIRHVEAHKGAMVEFMEQHADDALPD |
| 1246 | WP_069027120.1 |
| | MSELVPLTPLTVDRNSDITERLRQFVQDKEAFSPNTWRQLLSVMRICNCWSEDNQRSFLPMSADDLRDYL |
| | SFLAQSGRASSTVTSHAALISMLHRNAGLPVPNVSPLVFRTMKKINRVAVINGERAGQAVPFRLTDLLAL |
| | DKEWAGSDNLQALRDLAFLHVAYATLLRISELSRLRVRDVMRAGDGRIILDVAWTKTIVQTGGLIKALST |
| | RSTQRLEEWIEASGISSQPDAWLFTAVHRSGRPQIAEKPMSTRSLEQIFSRAWRTAGKEGAVKANKNRYT |
| | GWSGHSARVGAAQDMADKGYPIARIMQEGTWKKPETLMRYIRHVDAHKGAMVEFMEQYSDPDYPG |
| 1247 | WP_010671927.1 |
| | MSELVPLTPLTVDRNSDITERLRQFVQDKEAFSPNTWRQLLSVMRICNRWSEDNQRSFLPMSADDLRDYL |
| | SFLAESGRASSTVTSHAALISMLHRNAGLPVPNVSPLVFRTMKKINRVAVINGERAGQAVPFRLSDLLAL |
| | DKEWSGSDNLQALRDLAFLHVAYATLLRISELSRLRVRDVMRAGDGRIILDVAWTKTIVQTGGLIKALSA |
| | RSTQRLEEWIEASGLSSQPDAWLFTAVHRSGRPLIAEKPMSTRALEQIFSRAWRTAGKEGAVKANKNRYT |
| | GWSGHSARVGAAQDMADKGYPIARIMQEGTWKKPETLMRYIRHVDAHKGAMVEFMEQYGDPDYPG |
| 1248 | WP_109653747.1 |
| | MSELVPLTPLTVDRNSDITERLRQFVQDKEAFSPNTWRQLLSVMRICNRWSEDNQRSFLPMSADDLRDYL |
| | SFLAESGRASSTVTSHAALISMLHRNAGLPVPNVSPLVFRTMKKINRVAVINGERAGQAVPFRLTDLLAL |
| | DKEWAGSDNLQALRDLAFLHVAYATLLRISELSRLRVRDVMRAGDGRIILDVAWTKTIVQTGGLIKALST |
| | RSTQRLEEWIEASGISSQPDAWLFTAVHRSGRPLIAEKPMSTRSLEQIFSRAWRTAGKEGAVKANKNRYT |
| | GWSGHSARVGAAQDMADKGYPIARIMQEGTWKKPETLMRYIRHVDAHKGAMVEFMEQYSDPDYPG |
| 1249 | WP_134161939.1 |
| | MSELVPLTPQTVDRNSDITERLRQFVQDKEAFSPNTWRQLLSVMRICNRWSEDNQRSFLPMSADDLRDYL |
| | SFLAESGRASSTVTSHAALISMLHRNAGLPVPNVSPLVFRTMKKINRVAVINGERAGQAVPFRLTDLLAL |
| | DKEWAGSDNLQALRDLAFLHVAYATLLRISELSRLRVRDVMRAGDGRIILDVAWTKTIVQTGGLIKALST |
| | RSTQRLEEWIEASGISSQPDVWLFTAVHRSGRPLIAEKPMSTRSLEQIFSRAWRTAGKEGAVKANKNRYT |
| | GWSGHSARVGAAQDMADKGYPIARIMQEGTWKKPETLMRYIRHVDAHKGAMVEFMEQYSDPDYPG |
| 1250 | WP_111534863.1 |
| | MSELVPLTPLTVDRNSDITERLRQFVQDKEAFSPNTWRQLLSVMRICNRWSEDNQRSFLPMSADDLRDYL |
| | SFLAESGRASSTVTSHAALISMLHRNAGLPVPNVSPLVFRTMKKINRVAVINGERAGQAVPFRLSDLLAL |
| | DEEWSGSDNLQALRDLAFLHVAYATLLRISELSRLRVRDVMRAGDGRIILDVAWTKTIVQTGGLIKALSA |
| | RSTQRLEEWIEASGLSSQPDAWLFTAVHRSGRPLIAEKPMSTRALEQIFSRAWRTAGKEGAVKANKNRYT |
| | GWSGHSARVGAAQDMADKGYPIARIMQEGTWKKPETLMRYIRHVDAHKGAMVEFMEQYGDPDYPD |
| 1251 | WP_128085508.1 |
| | MRESASLINLTVNRSDDIAERLRQFVQDKEAFSPNTWRQLISVMRICHQWSEVNQRTFLPMRAEDLRDYL |
| | AFLAESGRASSTVTSHAALISMLHRNAGLDVPNASPLVFRTMKKINRVAVINGERAGQAVPFRLRDLLMV |
| | DRHWSGSENLQSLRDLAFLHVAYATLLRISELSRLRVRDVMRAGDGRIILDVAWTKTIVQTGGLIKALSR |
| | HSTQRLEEWITVSGLASHPDAYLFSAVHRSGRAQITDKPMTTRALEQIFSRAWAIAGKSGAVKANKNRYT |
| | GWSGHSARVGAAQDMADKGYSIARIMQEGTWKKPETLMRYIRHVDAHKGAMVEFMEQIADGDHSGOSS |
| 1252 | WP_115764642.1 |
| | MSELVPLTPLMVDRNSDITERLRQFVQDKEAFSPNTWRQLLSVMRICNRWSEDNQRSFLPMSADDLRDYL |
| | SFLAESGRASSTVTSHAALISMLHRNAGLPVPNVSPLVFRTMKKINRVAVINGERAGQAVPFRLTDLLAL |
| | DKEWAGSENLQSLRDLAFLHVAYATLLRISELSRLRVRDVMRAGDGRIILDVAWTKTIVQTGGLIKALST |
| | RSTQRLEEWIEASGISSQPDAWLFTAVHRSGRPLIAEKPMSTRSLEQIFSRAWRTAGKEGAVKANKNRYT |
| | GWSGHSARVGAAQDMADKGYPIARIMQEGTWKKPETLMRYIRHVDAHKGAMVEFMEQYSDPDYPG |
| 1253 | WP_111138305.1 |
| | MRKSAPLTNLTVTRNSDIAERLRQFVQDKEAFSPNTWRQLISVMRICHQWSEDNQRTFLPMSAEDLRDYL |
| | AFLAESGRASSTVTSHAALISMLHRNAGLAVPNASPLVFRAMKKINRVAVINGERAGQAVPFRLGDLLLL |
| | DQRWSGSDNPQWLRDLAFLHVAYATLLRISELSRLRVRDVMRAADGRIILDVAWTKTVVQTGGLIKALSS |
| | RSTQRLEEWMEVSGLAAHPDAYLFCAVHRSGRAQIMEKPMSTRALEQIFSRAWDIAGKCGAIKANKNRYT |
| | GWSGHSARVGAAQDMADKGYPIARIMQEGTWKKPETLMRYIRHVDAHKGAMVEFMEQIADSDVPG |
| 1254 | WP_008839747.1 |
| | MQDARKTDDTADDDLPDIVDLVVEMGHVAGSPARVDTLVEAATGFAKPARSENTQAAYAKDWRHFTGWCR |
| | REGFDPLPPSSQVIGLYIGACAAGDPKHGAPALSVATIERRLSGLAWNFAHRGQPMDRVDGHIATVLAGV |
| | RKKHAKAPRQKEPLLGDDLLAMIAMLGQDLRGMRDRAILLLGFAGSLRRSEIVGLDVVRNENGDGAGWVE |
| | IYPDKGALVTLRDRTGWREVEVGRGSSDQSCPVVALETWIKFGRIARGPLFRRISKDNKTVYVERLSDKH |
| | VARLVKKTALAAGIRADLAEGEREQLFAGHSLRAGLASSAEIEVRVQEQWGHASAGMTQKYQRRRDRFRV |
| | NRTKASGL |
| 1255 | WP_065417888.1 |
| | METVNGVLKYAQKSKLIYNLPTDIEKQPMNKPKVEFWAKEEIDFYLDKIHDSYLYTPILIEIFTGLRVGE |
| | LCGLRWCDIDFEDRYLTVNNQVIYDRELKMLVFSKILKTDTSHRKITMPKILTDYLKSIKSDALDTDFVV |
| | LDREGSMCNPRNLSMNFTKSIHKYKKSIDDLKIEDRSIPENYMQLKQITFHALRHTHATLLIFNGENIKV |
| | ISERLGHKNISTTLDTYTHVMEDMKNSTADLLDNIFRYIPSTT |
| 1256 | WP_058413992.1 |
| | MSDLDRYLNAATRDNTRRSYRAAIEHFEVSWGGFLPATSDSVARYLVAHAGVLAVNTLKLRLSALAQWHT |
| | SQGFPDPTKAPVVRKVLKGIRAVHPAREKQAEPLQLKHLEQVVGFLQEDANAAREAYDQPRLLRAKRDTA |
| | LILLGFWRGFRSDELCRLAIEHVQATPGAGISLYLPRSKSDRENIGKTYQTPALLRLCPVQAYSEWLSAS |
| | ALVRGPVFRAVDRWGNLGEEGLHPNSVIPLLRQALERAGIPADQYTSHSLRRGFASWAHRSGWDLKSLMS |
| | YVGWSDIKSAMRYVEAAPFLGMTLATPALV |
| 1257 | WP_099235164.1 |
| | MSDLDRYLNAATRDNTRRSYRAAIEHFEVSWGGFLPATSDSVARYLVAHAGVLAVNTLKLRLSALAQWHT |
| | SQGFPDPTKAPVVRKVLKGIRAVHPAREKQAEPLQLKHLEQVVGFLQEDANAAREADDQPRLLRAKRDTA |
| | LILLGFWRGFRSDELCRLAIEHVQATPGAGISLYLPRSKSDRENLGKTYQTPALLRLCPVQAYSEWLSAS |
| | ALVRGPVFRAVDRWGNLGEEGLHPNSVIPLLRQALERAGIPADQYTSHSLRRGFASWAHRSGWDLKSLMS |
| | YVGWSDIKSAMRYVEAAPFLGMTLATPALI |
| 1258 | WP_003139553.1 |
| | MASARYRQRGKKKLWLVEIRQGDKTLDSKSGFRTKKDAQKYAEPILQKIRNGNTLRPDMTLVDLYQEWLD |
| | LKIIPSSRQQTTINKFILRKKIIKKYFGNKKVSEIKPSDYQKAMNEYGNHINRNGLGRLNNDIHNAISMA |
| | IADKVLIDDFTINVELYSTKVAQAVDDKYLQSEADYNAVIEFITQKLDYHKSVVPYVIYFLFRTGMTYAE |
| | LIAVTWKDIDFTKSVLKTYRRYNTGTHKFVPPKNKTSIRTVPIDAKSLIILKSLQSQQKKANQELGVDNN |
| | ENFIFQHHSLRYDIPLIETVSKAIKEMLKTLKITPLLSTKGARHTYGSVLLHRGIDMGVIAKLLGHKDIS |
| | MLIEVYGHTLQERVEEEYQEVRNVLK |
| 1259 | WP_132898417.1 |
| | MSDDLDDTALTRISSTPLIPLLLDEEIEAARAYVAAARAPATRRAYESDWRIFLAWCAAHAIDPLPAAPG |
| | AVAIFLSGEAQEGARPSTIGRRLAAIGYMHAQAGLDPPQQQAGAIAIRNVVAGIRRTHGVKKVQKRAADG |
| | DMLRDMLRACDGDSIRDVRDRALLAIGMAAALRRSELVALNIDDVAITPDGLLITIRKSKTDQEGEGATI |
| | AVPEGRRIRPKALLLAWIACAGFGDGPVFRKLTPQGRITAKPMSDRGVALVVKARASGAGYDSAHVAGHS |
| | LRAGFLTEAARQGATVFKMKEVSRHKSLEILSDYVRNHELFRDHAGERFL |
| 1260 | WP_120809906.1 |
| | MEKIAHYLAAATRDNTRRSYAAAIRHFEVEWGGFLPATADSMARYLADHAETLSVSTLKQRLAALAQWHQ |
| | QQGFPDPTKAPVVRQVLKGIRALHPAQQKQALPLQIRQLEQLLAWLDGAIELAIQQQDHAARLRCRRDKA |
| | LLLLGFWRGFRGDELLRLQIENIALVAGEGMNCYLAQSKGDRQLQGRVFRVPQLSRLCPVSAYGEWLADS |
| | GLREGAVFRGISRWGVIGEDGLHINSLIPLLRRLFAAAGLAEAARFSGHSFRRGFANWASANGWDLKTLM |
| | AYVGWKDIQSAMRYIDAADPFARQRIENSLPPAPALPPVAD |
| 1261 | WP_075758185.1 |
| | MAKRANGEGTICKRKDGLWTGAVTIGRDAETGKLIRKYFYGKSKTEVQEKKAAQLEKTKGLAYLDADKLS |
| | VSQWLNKWLTLYARTTVRQNTLEGYQFIVDNHVIPALGAVKLGKLQSNQIQGMVNAILDKGGSPRLAEFS |
| | FAVLRRSLRQALKEELIYRDPTLAVSLPKKQKKEIVPLTDEEWTALLATAAKPVFRSLYAALLLEWGTGI |
| | RRSELLGLRWPDIDFARGAVSICHAAISTKDGPQLAEPKSKKSRRTLPVPPTVLAELKKHKSRQAARQLK |
| | AKTWENNNLVFPTRSGGLQDPRVFSRRFARLVKAAGITSGLTFHGLRHDHATRLFAQGEHPRDVQDRLGH |
| | ASITLTMDTYTHSMPSRQQAIASRLEANLPGRKPQADTAAAETAATAPTAAAVQQPVLQ |
| 1262 | WP_063313927.1 |
| | MVSKADRYLEASVRQNTSKSYAAALSHFEVTWGGFLPTTTESVVRYIAEYADQLALSTLKQRLAALANWH |
| | QSNGFPDPTKAPKVRQLLKGIRAVHPVQQKQAAPLALLHLEKAVAHLEDEVVQAKAAGNMGALLKATRDI |
| | ALLTIGFWRGFRGDELARLTIENTHAERYVGIRFYLGSSKGDRHNTGREYKTPSLSKLCPVEAYLNWIEA |
| | AGLTRGGIFRGIDRWGNISDRPLAAHSLVPLLRDTLNRCGLPSEIYSAHSIRRGFATWAASSGWDIKTLM |
| | EYVGWSDMKSALRYVEPAQQFGGLIRKLEG |
| 1263 | WP_038202623.1 |
| | MPIYKRSNKYWIDVSAPNGERIRRSTGTEDKLKAQEYHDKVKHELWQLERLDKQPERYFEEMIIMALRDA |
| | EPQSCFANKQIYARYFLSIFKGRKISSITSEEITNSLPTHSNETKSKLSNATQNRYRAFIMRSFSLAYKM |
| | GWITKPHHVTRLREAKVRVRWLERHQAVELINNLSLDWMKKLVSFALLTGARKGEIFSLIWRNVNLDRRI |
| | AVITAENAKSGKARAVPLNDEVVSILRNLPRECEFVFSSNAKRIKQISRTDFDRALKKSGIDDFRFHDLR |
| | HTWASWHAQSGTPLMALKEMGGWETLEMVNKYAHLSGEHLAKYSGVVTFLTQTDKCSSQKQHLKLLTG |
| 1264 | WP_110560945.1 |
| | MLSDVRILGTSRQAQAALHARVDPLTQQRLAETQDPARWREILSTARFTPPLPLLLAGIELPDGSYSPDT |
| | PLAQDVPYASAAQQMAQDHVADIPSGFELAIGLEIDDGTPCFLAWFRPLQPVGSCSGTVDAAPPAPVGQP |
| | AAAVAQWFSVVSAQPVPEHDGRLATARQAADAYMHRSKAENTLRTYRAAVRSWCRWAAGHALPALPARSE |
| | DVAAYLADMALQGRRTSTIDLHRAALRYLHHLAQTAVPTAHPMVTATLAGIRREAKETLPRQKTALTWDR |
| | LVRVVEAISPHDLVGARDRAILLLGFAGAFRRSELAALKVEDITVDEDGMQIRLGRSKGDPQRKGALIGI |
| | PRGLTRNCPVRAYETWLRQAGITEGPVFRRIWSARDRRAGATPVGTPPRIGPHALSDRAVTDIIRKRCGD |
| | THLEGDFGGHSLRRGAITTGAKDGYDLLELKRFSRHKSLQVVETYIDEASIKARHPGRSRF |
| 1265 | WP_102325737.1 |
| | MLSDVRILGASKRAQAALHDRVDPLTRQRLAETQDPARWREILSTARFTPPLPLLLAGIELPDGTYSPDT |
| | PLAQNVPYASAAQQMAQDHVADIPSGFELAVGLEIDDGTPCFLAWFRPLQPVEPCPGMADAAPPPAPVGQ |
| | PAAAVAQWFSVVSAQPVPEHDGRLATARQAADAYMHRSKAENTLRTYRAAVRSWCRWAAGHALPALPARS |
| | EDVAAYLADMALQGRRTSTIDLHRAALRYLHHLAQIAVPTAHPMVTATLAGIRREAKETLPRQKTALTWD |
| | RLVRVVEAISPHDLVGARDRAILLLGFAGAFRRSELAALKVDDITVDEDGMQIRLGRSKGDPQRKGTLIG |
| | IPRGLTRNCPVLAYETWLRQAGITEGPVFRRIWSARGHRAGATPVGTSPRIGPHALSDRAVTDIIRKRCG |
| | DTHLEGDFGGHSLRRGAITTGAKDGYDLLELKRFSRHKSLQVVETYIDEASIKARHPGRSRF |
| 1266 | WP_110095979.1 |
| | MLSDVRILGSSRRAQAALHARVDPLTRQRLAETQDPARWREILSTACFTPPLPLLLAGIELPDGSYSPDT |
| | PLAQGVPYASAAQQMAQDHVADIPSGFELAVGLEIDDGVPSFLAWFRPLQSVGSRSETADAAPPAPVGQP |
| | AAAVAQWFSVVSAQPLPEHDGRLATARQAADAYMHRSKAENTLRTYRAAVRSWCRWAAGHALPALPARSE |
| | DVAAYLADMALQGRRTSTIDLHRAALRYLHHLAQIAVPTAHPMVTATLAGIRREAKETLPRQKTALTWDR |
| | LVRVVEAISSHDLVGARDRAILLLGFAGAFRRSELAALKVDDITVDEDGMQIRLGRSKGDPQRKGTLIGI |
| | PRGLTRNCPVLAYETWLRQAGITEGPVFRRIWSARDRRAGATPVGAPPRIGPHALSDRAVTDIIRRRCGD |
| | THLEGDFGGHSLRRGAITTGAKDGYDLLELKRFSRHKSLQVVETYIDAACIKARHPGRSRF |
| 1267 | WP_014106907.1 |
| | MLSDVRILGTSRRAQAALHARVDPLTQQRLAETQDPARWREILSTARFTPPLPLLLAGIELPDGTYSPDT |
| | PLAQNVPYASAAQQMAQDHVADIPSGFELAVGLEIDDGMPSFLAWFRPLQSVGACPGTADAAPPAPVGQP |
| | AAAVAQWFSVVSAQPVPEHDGRLATARQAADAYMHRSKAENTLRTYRAAVRSWCRWAASHALPALPARSE |
| | DVAAYLADMALQGRRTSTIDLHRAALRYLHHLAQIAVPTAHPMVTATLAGIRREAKEVLPRQKTALTWDR |
| | LVRVVEAISSHDLVGARDRVILLLGFAGAFRRSELAALKVDDITVDEDGMQIRLGRSKGDPQRKGTLIGI |
| | PRGLTRNCPVLAYETWLRQAGITEGPVFRRIWSARGYRAGATPVGTPPRIGPHALSDRAVTDIIRKRCGD |
| | THLEGDFGGHSLRRGAITTGAKDGYDLLELKRFSRHKSLQVVETYIDAASIKARHPGRSRF |
| 1268 | WP_070406227.1 |
| | MLSDVRVLGSAVHARRALLKRVDPRTQARLDGVDPLAAAPILSSARFTPPLPLLLAGHALADGNETPDYM |
| | IGAAFPDAATAEQAARRHLGDAPSGFDVAVGLEIEVDAPRFVAWLRRQERVSVHASDPPSLPPAPVGQAP |
| | ATVARWFALVSSQPVPQPDGTLRTARQAVEAYVQRSKAVNTLRSYRAAVRSWCQWASAHDLPALPARSED |
| | VAAYLADMALRQRKTRTLDLHRAALRYLHHLAHITVPTSHPLVSATLAGIRREADHPAPLQKTALTWEKL |
| | TQAIDAMEGDDLVALRDRAILLLGFAGAFRRSELAGLAIQDIAIDEEGLQIRLTRSKGDPSAKGVFIGIP |
| | RGITRHCPVRAYEAWLRASCLTEGPVFRRVWRSRLPTPGVVPPRSKIGAAALSDRSVAEIVRQRCGGAGL |
| | EGDFSGHSLRRGAISTGAQDGYDLLELKRFSRHKSLQVVETYVDAASVKKRHPGRSRF |
| 1269 | WP_039683693.1 |
| | MTEGALVLASRWSNAANRRREGLRAAHEQNADALTDLLVTYMRLKSSRGARVSQLTLDHYCESVRRFLAF |
| | TGPPESPERALNQLAAEDFEVWMLTMQQASLSASSIKRHLYGVRNLMKALVWAGALASDPSAGVRPPSDT |
| | TPAHAKKQALSVARYAELLALPASMHPGDTLRAHRDTLLLELGGSLGLRAAELVGLNATDIDLNERQLRV |
| | LGKGSKGRTVPMTARVERSLRLWLMSRSSLQALNKLETPALLVSLSGRNYGGRLTTKGARTIAATYYQEL |
| | GLAPELWGLHTLRRTAGTHLYRATRDLHVVADVLGHASVNTSAIYAKMDTEVRREAMEAMERLRDSND |
| 1270 | WP_058101978.1 |
| | MARRKTPTVEYTINGVTRERKKRTETFGTLEMLKSGKWRVKYYLNGHRYATSAFDDKMEAERYRAELEAE |
| | RRAGTLKPPAAIKATNFKEYAHTWIEQHRTSKGKPLAPRTKAEILRMLEHGLSYFDPYSLTVIDAPLIRK |
| | WHAKRCKDAGATTAGNEARVLKAILQTAVNDDVLEKNPVPGELTRSKTGKEHRAPTTGELKRILDHLEGQ |
| | WRVAVLIAAFGGLRAGELSALERQDIEVRNGRVVIHVTKQAQWLDGEWIVKPPKSVDGVRFVTLPEWITP |
| | DVETHLRRNVSQFPNCRVFVTSRGAKYVSTATWGRVLHKAMADAGIDAPIHWHDLRHFFGTNLAKSGVGI |
| | KELQAALGHGTPAASLSYLEQEHGLTAELANRLPRLDDSSSLIVFPRKATA |
| 1271 | WP_073288322.1 |
| | MSTEITRIPDEPQALGSQLSTAAANVARYIKAGLEGADNTVLAYSADLKSFGDFCQLHGLNQLPADVATL |
| | ARYVADLADIPRKLSTIRRHLAAIHKHHQLRGYLSPVRADELALVMEGITRTLGKRQKQAPAFTVEELKE |
| | SIRRLDVTTTAGLRDRALLLLGFAGAFRRSELVALDVEHLEFTEKALIVHLAKSKTNQAGEVEDKAVFYA |
| | ATSAFCPVRCTRAWLQQLGRNTGPLFVSLKRGKVKGQAMPTLKRLSPLRVNELVQLHLNHDEDGHKVPEK |
| | NYSAHSLRVSFITISVLRGQSNRFIKNQTKQKTDAMIDRYSRLDDVVSFNAAQNLGL |
| 1272 | WP_102906331.1 |
| | MQPDSLPAVLSVHPVLDPARLSRLTEESARELIRQGQSANTRASYQGAMRYWAAWFAARYGQELKLPMPV |
| | PVVVQFIVDHAERELVLEDADEAAAPAGKKTRRKVAKKVPLVFDLPPEVDQVLVAHGYKKKLGAYAQNTL |
| | VHRLAVLSKAHQNVNVDNPCNHTQVRELIKNVRSGNAKRGVKPHKQAALTKAPMDALLATCDDSPRGKRD |
| | RALLLFAWASGGRRRSEVADAIMENLRKVDSRGYLYKLGHSKTNQDGKENPDDAKPVSGKAAAAMDAWLE |
| | VSGITEGPIFRRILKGGKVLDEPLDPTAVRKIVKRRCLQAGLPGDFSAHSLRSGFVTEAGRRKMDPADAM |
| | AMTGHRHYETFMGYYRAEDPLDRKASRMLDGDDAAVE |
| 1273 | WP_045572321.1 |
| | MTYLVYSSDVFKETELRKLDDGTFHCQPTNDNIGSLPTLFYQNGIFNYEANSYLFYLKAIKKAEDLSPCA |
| | QALRAYYQFLEDNGLNWDNFPPVKRLKPTYLFRSHLLKQIKQGELAHSTASVRMNQIVNYYKWLMHDGYL |
| | CIKNEKEAPFKMEFVSIQNNGTLAHISPTFTIETSDLRIKVPRDADSKNIRPLSPLSIDALSVLTHHLLR |
| | TSEELRLQSLLAIDTGMRIEEVATFTLDALDTAIPLAESQYRFEMLLCPRSTGVQTKFLKTRTVEISSNL |
| | LQLLNQYRVSERRLKRVAKLNEKIEQLDNEVPPFTQKKIELLDRSKRHEPLFISQQGNPVTGKIIESRWV |
| | EFRAEIRQAEPSFSHRFHDLRATYGTYRLNDLLEANLPVVECMELLMGWMGHKNESTTWKYLRFLKRKEA |
| | FKVKFGILDSIMHEALGGEDE |
| 1274 | WP_041338471.1 |
| | MTSKARFPGYPLFDTAELIHEQADLELYPGLQAALMALPQSHRDDFHIAQRFLVKYSDVSGTYNRFRSEI |
| | QRFLNYTWHIAKRHLSQADSDLLSSYFSFLKTPPASWVSRGIYPAFFDSNDQRHQNPDWRPMAQRSKDSN |
| | APYSVTQASLNASRTALQTFFKYLMAQDYLQRNPLLDVRKRDRNAKPSLDKDADAEVRRLTDWQWSYLLE |
| | TLTQLASANPKCERNLFVIVTMKSLFLRVSELAPRPVDRGQMRTPSFSDFRRTIVDGEAYWIYSIFGKGD |
| | KTRQVTLPDAYLSYLKRWRLHLGLTSPLPVPGESTPILPSAKGDAIGKRQVQRIYEQSIVATADRMEQEG |
| | YGDEARQLLAIRTETHYLRHTGASQAIEAGGDIRHISEELGHANATFTESVYVNSEQARRRTEGRRRLV |
| 1275 | WP_011043709.1 |
| | MARKVKPLTNTEVKQAKPKDKIYKLSDGDGLQLRIMPNGSKQWLLDYFKPYTKKRTSFSLGSYPDVTLAN |
| | ARAKRASSRELLAQDIDPKEHKEDHHREQLLIASHTLKSVAEDWFAIKKTTITEVTAKSLWRKFENHVFP |
| | KLGHRPIDKILAPEAIEALKPLAAKGNLETTGKIIGHLNNIMTHAVNTGILHHNPLSGIRSAFSAPKVTN |
| | MPTIKPNELGKLMKVISYASIKLVTRCLIEWQLHTMTRPSESAKAEWSEIDLENRLWVIPAERMKMRLEH |
| | KVPLTKQSIEILERLKPITGHRTHLFPSHINHHKHCNVETANKALIRMGYKNRLVAHGLRALASTTLNEQ |
| | EFNADVIESALSHVDKNEVRRAYNRAEYLDSRRELMCWWSEHIEQAVSGNLPVSTLKEQKIICNE |
| 1276 | WP_041736950.1 |
| | MLLTKPVPLYPPYIDLCDFDFDDYPQLDKIFSSNEPWWLEQFNWGKIFLTYIGRNKSAHTYERFRNDVER |
| | FLLWSFIVKKKPIDQLRKSDLLEYADFCWQPPVDWIGTSNQERFKITNGYSAANELWFPYKIQAPKSLKS |
| | QFVIDKKKYRPSQQTLSSMFTAIIVFYNYLMAEDFCIGNPAQIAKKDCRHFIIDSQVKEIKRLTGSQWQF |
| | VLDTAVEMADENAMFERNLFVIASLKTLFLRISELSERPNWSPTMGHFWQDDDENWWLKIFGKSRKLRDI |
| | TVPIDFLPFLERYRASRGLLGLPSSNENSILVEKVRGQGGMTSRHLRRLVQSVFDQAHENMRRSEGENKA |
| | LKLKEASAHWLRHTGASMEIERGRPLKDISEDLGHASMATTDTVYVOSENKKRAESGKRRKVD |
| 1277 | WP_070374986.1 |
| | MPIKSKITVTNIKNLVPSDKRLNDTDISGFHARITPLGLITYYLFYRLNGKQVNYRLGVDGQMTPAQARD |
| | LAKSKIADVTQGVDVQALRKQERTSTKYSKLSSLQYFLDEKYTPWLKSRNPKTAEKTVKAFKSSFPKLMD |
| | FQLSDINAWEIEKWRNKRLADGVKPATTNRQINTIKGCLSRAVEWGVIDSHDLRNVKTLTVDNSKVRYLS |
| | KDEESRLRESLKSCDTAFLEVIVLLAMNTGMRKGELLSLQWHDINFDNKILTVDFQNAKSGNTRHLPLNT |
| | EAFNQLIHWQKLSGSEGYVFKGRNNEPLKDFPSLWAEILDEANITHFRFHDLRHHFASKLVMASVDLNTV |
| | RELLGHSDLKMTLRYAHLAPEHKAAAVNLIG |
| 1278 | WP_033082129.1 |
| | MSLTKPIPLYPPYIDLCDFVLEDYPQLEKIFSSNEPWWLEQFNWGKLFLTYIGRNKSNHTYDRFRNDVER |
| | FLLWSFIEKKKPIDQLRKSDLLEYADFCWQPPVTWIGTSNQERFKITNGYSAANEFWFPFKIQAPKSLKS |
| | QYIIDKKKYRPSQQTLSSMFTALIVFYNHLMAEDFCIGNPAQIAKKDCRHFIIDSQVKEIKRLTASQWQY |
| | VLDTAVEMADGDPVFERSLFVIASLKTLFLRISELSERPTWSPTMGHFWQDDDENWWLKIFGKSRKIRDI |
| | TVPIDFLPFLERYRGSRGLLGLPARNENSVLVEKVRGQGGMTSRHLRRIVQSVFDLAHDNMRRSEGENRA |
| | LKLKEASAHWLRHTGASMEIERGRPLKDISEDLGHASMATTDTVYVOSENKKRAESGKRRKVD |
| 1279 | WP_057180966.1 |
| | MKLTELSLADLNVVVPSKHQEAANKYFTDIFNLLPANTQRSYKSDLKQYYDFCFANDMPGLTPDMDLTET |
| | SIKAYVLAMCESQLAHNTIRHRMATLSKFMAIAKFPNPLKNSEYLRDFIKLQMKAHDIYARANQAPALRL |
| | RDLEEINTHVIPKTLLDFRDLAMINIMFDGLLRADEVAPVQLKHIDYKQNKLLVPTSKTDQSGKGSLRYI |
| | SNTSISYVTAYIAEANIDRKSKREKVKDDPTRINKGILFRGISPKGTTMLPFDETVTRLAHMQKIAYVNI |
| | YKSLKRIAKKAGIDLPITCHSPRVGAAVTMAENGVSMKKIQDAGDWKSPDMPARYTEQADIGNGMSDIAN |
| | IFKR |
| 1280 | WP_051743915.1 |
| | MASEAPDPDGTLPATVPQSALPDILRADLERAAAYKKAARSSATHRAYGSDWTIYTDWCAARGLAPMPAH |
| | PEQIAAFVANQADAGFKPTTIERRVAAIGHYHRASNYPAPTAHPEAGGLREALAGIRNDKRVKKVRKNAA |
| | DASALRHMLAEIKGASLRALRDRAILAIGMAAALRRSELVALTLQSVGILEHGLELYLGATKTDQAGEGA |
| | TIAIPEGTRIRPKSLLLDWITAVRALEADVERAPADEAAMPLFRRLTRSDQLTGEPMSDKAVARLVKRYA |
| | ASAGYDASKFSGHSLRAGFLTEAASQGATIFKMQEVSRHKTVQILSEYVRSADRFRDHAGDKFL |
| 1281 | WP072598906.1 |
| | MASDDPSDTGNLPVTVPQPALPDILRAEVDRAADYAKASRSAATQRAYASDWDIFTAWCDVRGMESLPAT |
| | PAAVATFLASEADSGLKVPTIGRRLAAIGYHHRQAGFDPPQEMAGASAIKEVLAGIRREVGTRPERKAPA |
| | DADALRDMIRTIEGDDLRAVRDRAMLAIGMAAALRRSELAGLLIDDVELPPEGLRLLIGRSKTDQSGEGA |
| | VIAIPEGRRIRPKALLLAWIDAAMEAARNLNNPLITFESGPLFRRLTRGGELTADPVSDRAVARLVQRCA |
| | AAAGFDPTDYAGHSLRSGFLTEAARQGASIFKMRDVSRHKSVQVLADYVRDFEMFRDHAGEKFL |
| 1282 | WP_069337675.1 |
| | MASDDPSGSDNLPATVLQPTLPDILRAEVERAATYAKASRSPATQRAYASDWEIFTAWCDARGLASLPTT |
| | PAIVATFLAFEADRGIKANTIGRRLAAIGYHHRQADVDPPQEQSGAGAMLEVLAGIRNALGTRKDRKTPA |
| | HADALGAMLATIIGNDLRALRDRAVLAIGMAAALRRSELVALWIEDVELPTEGLRLWIGRSKTDQTGEGA |
| | VIAIPEGRRIRPKALLLAWTEAAMAGARELNNPLITFETGPLFRRLTRGGELTADPMSDRAVARLVQRCA |
| | ANAGFNPAEFAGHSLRSGFLTEAARQGASIFKMRDVSRHKSVQVLSDYVRDAELFRDHAGEKFL |
| 1283 | WP_060734294.1 |
| | MVPRPDMVVASPELDGRSGSNRAVRRSLLTAETDREAIDAWVSSYDSPNTRETYRREAYRLWLWAVLECR |
| | KAFSSLGHEDLLEYRGFLLDPQPAHLWVSEGGQKFPRADPRWRPFYRKLNKAGQQQAMTILNVLFSWLVE |
| | SRYLEGNPLSLSRRRKKPTEPQVHRHLSPEMWRQTLEYVEELPRGTSREQRHYHRARWLVSLFYLTGARI |
| | SEVVSTSMGQFYAAQGEDGEIRWWLRIQGKGEKARDVPATSDLMAELAVYRESYGLSPIPHRDEVIPLMM |
| | RYGERMLPMTRSSAHVAIKQVFKGAAVRLRAKGPEWKNRADLLEAASAHWFRHTAGSHMASKMNLVTVRD |
| | NLGHGNISTTNTYLHTGNDARHQETEQHFKIEWPRPVK |
| 1284 | WP_036365362.1 |
| | MLTDTAIKRLKPSTDCTPNKPDKYSDGNGLQLIVRPTGTKVWLVAYRYHGRQTNITLGRYPTISLQQARL |
| | QALEIKQKLAQGIDPKTAKPNTVLFGDIANEYHTQRDRNNPINKGKYTVSKVTHKKDLSQYNNDIAPHIA |
| | HLDINAVTPVMILDIAKRIEKRGAYDMAKRAIRQIGAIFRHARDKGLYDRLPPTDGLEKRLTKRKQEHFA |
| | RLEFHELPQFFSHVHHSTCEPLTKLAFKFICLTFVRTIEMRFMQWAEIDWDNYLWRIPPERMKMDKPHIV |
| | PLAPQAIEILHQIKAMGLSDEFVFYNPKTKKPVSENFLTQALKRLGYQGRMTGHGFRGIASTKLHELQYN |
| | HECIELQLAHAKADKVSMAYNGAEHLPYRVQMMKEWAKLIEHACQ |
| 1285 | WP_088652586.1 |
| | MPSEAEKSTSAPSGDFEDARIDDRDHDERGDIALPAHVAGTGTLDRLVNTARDYARVASSENTLKAYATD |
| | WTHFTRWCRMKGAEPLPPSPEIVALYLADLASGSGPSPALAVSTIDRRLSGLAWNYAQRGFILDRKNRHI |
| | ATVLAGIKRKHARPSVQKEAILAEDILAMVATLTYDLRGLRDRAILLLGYAGGLRRSELVSLDVHKDDTP |
| | DSGGWVEIMEKGALLTLNAKTGWREVEIGRGSKDQTCPVHALEQWLHFAKIDFGPVFVGTSRDGKRASKT |
| | RLNDKHVARLIKRTVLDAGIRSELPEKDRLALFSGHSLRAGLASSAEVDERYVQKHLGHASAEMTRRYQR |
| | RRDRFRVNLTKAAGL |
| 1286 | PLX79396.1 |
| | MTADSDPVLLSFKCYLRDERNLSPHTRSAYMRDLLEFRQVITSLSGRENGFDWVAVDHLTIRRYLAYLHK |
| | RNRRTTIARKLSALRTCFRFLVREGVVQSNPADLVATPRRETFLPQTMTIDEVFALLEGKGLGESSRLRD |
| | KAIFELLYSSGLRIGELTSLDIGRVDMEQRLVRVVGKGSKERIVPIGSKAREALVAYLEARSWPAEKEPL |
| | FLNFRGGRLSARSVQRHLKQLLLAAGLSTELTPHSLRHSFATHLLDGGADLRAIQELLGHSSLSTTQRYT |
| | HVSMEQLTAVYDKAHPRSRKK |
| 1287 | WP_012852732.1 |
| | MDGPTLQDLAERWLDHKRASGRGMSDNTEAAYRADLNAWGRALADHHAIDTPDQTRPLEALHTGHLTAEA |
| | LTAAAASFYREGKTAATRSRRISALRGWCAWLVRTGHLTADPTTDLETPRLPRRLPVALTDAQLAAIVQA |
| | ASTPWQGARAQWVRLDRALLALFAGAGARTGEVVALRVGDVICEEDGGGLLRLRGKGGAHRNVPLHADAM |
| | QPVTDYLDERRALLGPFDAEDPLLVARNGKAITTGMIEYRVDQWFRRAAVRRPEGELAHVFRHTYAVGVL |
| | QNGASLNELQAVLGHQNLATTSIYTKVAAEGLKDVARVAPVLRHLRATRPAPTSAPPG |
| 1288 | WP_012852733.1 |
| | MRPAEFEPICVQEAVDRYVEMVRAKALTGQFSPATAEVYCRDMAVFAELAGPGRLLDDLDGADVDAVLLA |
| | FARRPDGRRRRHDPPPAGRALQSAASQARFRRSVSVFFRYAATAGWVRLDPMRAVTVMPRQRGGLRAERR |
| | ALTAEQAGGLVQAARRLAECGPAEARTGRAARRDQRTEIRDGLVVLLLATVGPRVSELTGANVEDFFVND |
| | GRWYWRIFGKGGRTRDVPLPEAVARVLQAYLERGRPLLDRGVEPKALLLSWRGRRLARGDVQAVIDRVLA |
| | RVEPSRRRAVTPHGLRHTTATHLLAAATDMDAVRRVLGHADLATLSRYRDELPGELEAAMRVHPLLKDQA |
| | PGG |
| 1289 | WP_065935487.1 |
| | MDVLNITNQISQVDETPLDLHFLTLNAQEAAADFIAAGTAANTVRSYRSALAYWSAWLQLRYGHALGDTH |
| | LPVEVAVQFVVDHLARPTDDGKWVHLLPASIDAALIRAKVKAKPGALAYNTVSHRLSVLGKWHRLNSWDS |
| | PTDAPVLKSLLREARKAQSRQGLSVRKKTAIVIESLQALLATCTDGLRGQRDRALLLLAWSGGGRRRSEV |
| | VNLQISDVRQLDTDTWLYALGVTKTNTGGVRREKPLRGPAAEALSAWLLAAPAESGPLFRRMYKGDKVGS |
| | TGLSADQVARIVQRRAKLAGLKGDWAAHSLRSGFVTEAGRQGVPLGDVMAMTEHRSVSTVMGYFQAGALL |
| | ESRATTLLKFSTVENEDTSGGHHLASDSKNQA |
| 1290 | WP_010452301.1 |
| | MSELDRYLHAATRDNTRRSYQAAIEHFEVGWGGFLPATSDSVARYLAAHAGVLSINTLKLRLSALAQWHN |
| | SQGFADPTKSPVVRQVFKGIRALHPVQEKQAQPLQLQHLEQVIASLDGEVQAALALQDRPRLLRARRDTA |
| | LILLGFWRGFRSDELCRLEVGNVMAQAGAGITLYLPRSKSDRDNLGRRYQTPALQRLCPVQAYIEWINCA |
| | ALVHGPVFRGIDRWGNLGEEGLHANSIIPLLRQALGRAGIAAEHYTSHSLRRGFATWAHRSGWDLKSLMS |
| | YVGWKDLKSAMRYVEASPFEGMSLAVEKPVAQES |
| 1291 | WP_090208726.1 |
| | MGKADLYLKAGARENTRKSYRAAIEHFEMDWGGYLPTTGDGIVRYLANYAGHHSINTLKQRLAALSQWHI |
| | TQGFPDPTKTPDVRRVLKGIRAVHPAKTKQAAPLQLSQLQQVVGWLDTEANGAHHRGDHKCEVRHRRSIA |
| | LVLIGFWRGFRGDELARLEIEHTHAVSGEGISFFLPYTKSDREHQGATYHTPALKMLCPVEAYINWITIA |
| | GLASGPVFRGIDRWGNLSTEGINPHSLIPMLRRILAEAGLPAAMYSSHSLRRGFATWATANGWDIKALMT |
| | YVGWKDMQSALRYIDASASFAGLAVGKRGSELQIGR |
| 1292 | WP_062152119.1 |
| | MATSSTFIVPAIVADTSDDAGERFLEFFAATIRNANTRSAYMRAVEHFLGWRGVAGLASLGDIRPLHIAA |
| | YIEECQGLFSAPTVKLRLAGLRSLFDWLVRTGVMASNPTTSVRGPSHDVQRGKTPILAADEAKRLIASIP |
| | ADTPVGLRDRALIALMTYSFARVSAATGMNVEDLIQTAGRSWVRLHEKRGKVHELPVHHKLLDHLDAYLA |
| | VAGHRDQPKAPLFRSAKGRSGALSNGRLSRHDAYAMVRRRAVAAGIVAKIGNHSFRGTGITTFLLNEGTL |
| | ELAQEMANHSSPRTTKLYDSRRDGITQDAIERIRIE |
| 1293 | WP_013196326.1 |
| | MAALKRATGNDVITDSTITAARSAHVGRHVLIWLEQVKAASLSELDNFGDEGTVEQVMKVWVKLSLLISR |
| | RRPEIAVSSLLKHVLPNIGSQPLKTLNRLRLNRLYNILIADGKKEEARRVFALTKQFLAWAEMQGYLDHS |
| | PIASMKKRDVAGRATPPRSRQLTDAEIWVFWHGLDNWALSEQARWALRLCLVSARRPDEIVQAQKGEFDL |
| | QLGLWMQGTRNKSQREHVLPISPLMRQCIEALLNAADPDSPWLVSAPRDPQQPLSKGALNQALRRMIRAP |
| | RGLGLEPFTPRDLRRTARSKLSALDTPNDVARKIMNHALEGIDRVYDTHDYLSQMRSAMNTFSDAVKQI1 |
| | ECESYHLLRHRYDGETLILSNLSIMAMSR |
| 1294 | WP_013577822.1 |
| | MSKIGSVTTVEGDFAAGNVGQHVLAYLQNVKMTPLAKLDDFDEEGNATVGQVINIWIRLSLILTRRRPEI |
| | AVSSLMKHVLPVIGEVPLNKITRLRLNRLFNVLLADGKVSEAKRVFALCKQFFGWAETQGYLAHSPLSTM |
| | KRRDVGGRNTPPRERTLTDAEIWVFWHSLDLWDISEQCRWALRLCLLTARRPDEVVRARKDEFHLQIGIW |
| | RQGTRNKSARDHNLPLTPLMITCINALLSASPKHSPWLVPSPLDAQRPLSRGAVTQVIRRLLRAERGPGI |
| | DAFTTRDLRRTARSKLSSLNVPNDVARKIMNHSLEGIDRVYDTHDYLPQMKQALEAFSDNIQGIIDAPDY |
| | YDLRHHFEGESLHVRESSLLFMER |
| 1295 | WP_039389914.1 |
| | MTPDLTQIPARSAHVGRHVLIWLEQVKKASLSELDNFGDEGTVEQVMKVWVKLSLLISRRRPEIAISSLL |
| | KHVLPNIGSQPLKTLNRLRLNRLYNILIADGKKEEARRVFALTKQFLAWAEMQGYLDHSPIASMKKRDVA |
| | GRATPPRSRQLTDAEIWVFWHGLDNWALSEQARWALRLCLVSARRPDEIVQAQKAEFDLQLGLWMQGTRN |
| | KSQREHVLPISPLMRLCIEALLRAADPDSPWLVPAPRDPQQPLSKGALNQALRRMIRAPRGLGLEAFTPR |
| | DLRRTARSKLSALDTPNDVARKIMNHALEGIDRVYDTHDYLSQMRSAMTIFSNAVEQIIRCESYHLLRHR |
| | YDGETLTLDDLSVMAMSR |
| 1296 | WP_033768926.1 |
| | MTPDLTQIPARSAHVGRHVLIWLEQVKKASLSELDNFGDEGSVEQVMKVWVKLSLLISRRRPEIAISSLL |
| | KHVLPNIGSQPLKTLNRLRLNRLYNILIADGKKEEARRVFALTKQFLAWAEMQGYLDHSPIASMKKRDVA |
| | GRATPPRSRQLTDAEIWVFWHGLDNWALSEQARWALRLCLVSARRPDEIVQAQKAEFDLQLGLWMQGTRN |
| | KSQREHVLPISPLMRQCIEALLRAADPASPWLVPAPRDPQQPLSKGALNQALRRMNRAPRGLGLEAFTPR |
| | DLRRTARSKLSALDTPNDVARKIMNHALEGIDRVYDTHDYLSQMRSAMTIFSDAVEQIIECESYHLLRHR |
| | YDGETLTLDDLSLMAMSR |
| 1297 | WP_056773790.1 |
| | MTEQISETETDFAAENVGRHVLVYLQQIKATPLAKLDDFDEEGNATVGQVINVWIRLSLILTRRRPEIAV |
| | SSIMKHVLPVIGDVPLNKITRLRLSRLFNVLLAEGKISEAKRVFALCKQFFSWAETQGYLPHSPLGSMKR |
| | RDVGGRNTPPRERTLTDAEIWIFWHGLDLWDISEQCRWALRLCLLTARRPDEVVRARKDEFNLRISVWRQ |
| | GKRNKSARDHSLPLTPLMLVCINALIAASPKNSPWLVPSPKDPGKPLSRGAITQVIRRMLRAERGLGIAP |
| | FTTRDLRRTARSKLSALDVSNDVARKIMNHSLEGIDRVYDTHDYLPQMKQALDAFSDNIHDIINAPDYLS |
| | LRHKFDGEFLQIPQISLLYMEN |
| 1298 | WP_012075809.1 |
| | MNTTLLPLHSGIAPLSVDRLDADARTAAAAFVAAGTAANTVRSYRSALAYWAGWLQLRYHRHLEDSALPE |
| | AVAVQFILDHLARPADGDWVHLLPPEQDAALVDAGVKAKLGALSYNTVRHRLAVLAKWHDLKSWPSPTET |
| | VAVKTLLRDARKAQARQGVSVRKKTAAVREPLEAMLATCTDGVRGLRDRALLLLAWSGGGRRRSEVVGLQ |
| | VGDVRQLDADTWLYALGVTKTETEGMRREKPLRGPAAQALAAWLAVAPAATGPLFRRLYRGGRVGTAGLS |
| | SDQVARIVQRRAKLAGLEGDWAAHSLRSGFVSEAGRQGVPLGEVMTMTEHRSVPTVMGYFQAGTLLGSRA |
| | TRLLALPLEVPDYPEE |
| 1299 | WP_033986789.1 |
| | MNNTIPLLSGDSPLLAVDRLDAEARAAAAAFVAAGTAANTVRSYRSALAYWAGWLQVRYGQTLEMGPLAD |
| | TVAVQFILDHLARPADGDWVHLLPPALDAALVDAGVKAKLGALRYNTVRHRLAVLAKWHDLKSWPSPTDS |
| | AAVKALLREARKAQARQGVSVRKKTAAVREPLEAMLATCSDGVRGLRDRALLLLAWSGGGRRRSEVVGLQ |
| | IGDVRQLDADTWLYSLGVTKTETEGMRREKPLRGPAAQALAAWLAVAPAATGPLFRRLYRGGRVGTAGLS |
| | NDQVARIVQRRAKLAGLEGDWAAHSLRSGFVSEAGRQGVPLGEVMAMTEHRSVPTVMGYFQAGTLLGSRA |
| | TRLLALPLEVPDYPEE |
| 1300 | WP_005752218.1 |
| | MQEQLDKYWNYLRIERQVSPHTLTNYQRQLYRIVDILAENGITSWQAVTPSIVRFILAQSNKDGLKERSL |
| | ALRLSVLRRFFTYLVQQQDINVNPATGVSAPKQNRHLPKNIDAEQVQQLLNNDSKEPIDIRDRAILELLY |
| | SSGLRLSELQSLNLNSINTRVREVRVMGKGNKERIVPFGRYASHAIQQWLKVRILFNPKDEALFVSQLGN |
| | RLTHRAIQQRLEVWGIKQGLSSHLNPHKLRHSFATHMLEASSDLRAVQELLGHSNLSTTQIYTHLNFQHL |
| | AEVYDSAHPRAKRKK |
| 1301 | WP_011271867.1 |
| | MKSYEKAIRQLQKNCSIQYPDEISDSLILQWRKRVVGQSIIEVTWNSYIRQLKTIFKFGIEKQLLPFTKN |
| | PFDGLFIREGKKKRKVYTSSDLKKLSFGITESKHLPSILRPLWFTKTIIMTFRYTAIRRSQLNKLRIKDV |
| | DLLNQVIHIPSEINKNHEYHILPISTTLYPYLKKLLTELSKLNQPVESQLFNINLFSNAVKRKGEKMTND |
| | QVSYIFKVISKYTGIISSPHRFRHTAATNLMKKPENLYIAKQLLGHKDVKVTLSYIEDNIDSIREYTELL |
| 1302 | WP_069481344.1 |
| | MITLKDAWNRYILLLQSLKKSAATMKQYNMDGQHFLSFAHEKNYLYVDHQFQELLLIYCHYLKETYSNIN |
| | TFNHKIATMRGFVDFIFLREWMEPFDYQHILQPRKRQKEALQVLTTKQIGQMANVWPTYFQYAKTVEHAW |
| | LARRNGCIVQVLMETGCKPAELVRMKWSHFQKEKSTLFIANQNGRREVKCSPILMDMLAHYKEETEAMHD |
| | KEVEEWVWVSEASMTKPITTKTVERIFQTMSKDIGKNVRATDLRYTVMQRAFQEEKTLEHIQQEMGYVRK |
| | WVLTERQQRFE |
| 1303 | WP_092837735.1 |
| | MPLPKPGNLPALQPEMLSDATAQAVEELMREGESANTLASYRSALRYWAAWFNLRYGQPITLPVPPAAVL |
| | QFIVDHAQRSSADGLLHELPPAIDAVLVQAGFKGKPGPMALNTLVHRIAVLSKTHQLKEVENPCQDAKIR |
| | DLLAKTRRAYGKRGDLPRKKDALTKDPLMAMLETCDLSTLKGLRDRALLLFAFASGGRRRSEVAGADMKH |
| | LRRHGVSSFTFVLAHSKTNQHAADRPENYKPIAGMAGEALQAWVEAARITEGPVFRRVLKGGRLAGALSP |
| | AAVRDIVKERARAAGLSEDYSAHSLRSGFVTEAASQNVPLADTMAMTGHRSVATVMGYFRSTGSSQAAHL |
| | LDPKAPPDRS |
| 1304 | WP_057202984.1 |
| | MRLPALKTHAALEPGVLSDMTALAVDQLMREGESANTLASYRSAVRYWAAWFNVRYGQPITLPLPPSAVL |
| | QFIVDHAQRTTAEGLAHELPQAIDAVLVDAGFKGKPGPMALSTLVHRVSVLSKAHQVRDMKNPCQDAQVR |
| | ELLSKTRRAYAKRGALPQKKNALTKDPLMAILATCDATTLKGLRDRALLLFAFASGGRRRSEVASAQMRH |
| | LQRSGPTSFVYTLAHSKTNQTGSDRPENHKPIQGMAGEALQAWLEATGITEGPIFRRVRKGGRLGEALSA |
| | AAVRDIVQERARAAGLPDVFSAHSLRSGFVTEAATQKVPMADTMAMTGHRSVASLLGYFRVSDASQAARL |
| | LEEEGPQA |
| 1305 | WP_057267549.1 |
| | MRLPALKTHAALEPGVLSDMTALAVDQLMREGESANTLASYRSALRYWAAWFNVRYGLPITLPLPPSAVL |
| | QFIVDHAQRTTAEGLAHELPQAIDAMLVKAGFKGKLGPMALSTLVHRVSVLSKAHQVRDMKNPCQDAQVR |
| | ELLSKTRRAYAKRGALPQKKNALTKDPLMAILATCDATTLKGLRDRALLLFAFASGGRRRSEVASAQIRH |
| | LRQSGPAAFVYTLAHSKTNQTGSDRPENHKPIQGMAGEALQAWLAATGITEGAIFRRVRKGGRLGEALSA |
| | AAVRDIVQERSRAAGLPDVFSAHSLRSGFVTEAATQKVPMADTMAMTGHRSVASLLGYFRVSDASQAARL |
| | LEEEDPQA |
| 1306 | WP_077019634.1 |
| | MAALTKTPSGTWKATIRRVGWPTVAKTFRTKRDAEDWARRTEDEMVRGVFIQRAPSEKTTVADALDRYER |
| | EIVPTKKASTQRREGARIRELKEHFGKYSLAAVTPDLVGRYRDDRLAQGKANNTVRLELALLGHLFNVAI |
| | KEWHIGLIFNPVSNIRKPRPGEGRNRRLSGREQATLLTAVDEHTNPMLGWIVRLAIETGMRQSEILGLRR |
| | GQVDLERRVVRLTDTKNNDARTVPLTKLAASVLQSALANPVRPIDTDLVFFGEPGRDKKRRAYQFTKVWN |
| | GIKKRTGLVDFRFHDLRHEAVSRLVEAGLSDQEVASISGHKSMQMLRRYTHLRAEELVGKLDALSAAR |
| 1307 | WP_083768887.1 |
| | MIECFWVYFTNRREPLFDGLSSVEEFISHLESERHFSNNTTAAYKNDILQFHDWLQGKDHINSWAAVTSS |
| | DIQDYLLYLKGNQDRAYAPSTQARKMAAIKSFFQFLVAKSVVDQNPASDLISPRVQKYWPKAISVQEVNM |
| | LLAAASDSETPEGIRDRAMLEVLYRTGLRVSELVSLNVDDINLDESHLKCIGRGKTRKVPLSQPAVDVLK |
| | LYLERSRPLLVRGQDEQALFVNHRGQRLTRQGFWLILKAYASEAGIKGITPHTLRHSFAAHMIDGGIDLR |
| | QVQEWLGHASITTTQVYRQIKSNSHSEKIIDIKSREERIPEEVAK |
| 1308 | ACZ42745.1 |
| | MFDGLSSVEEFISHLESERHFSNNTTAAYKNDILQFHDWLQGKDHINSWAAVTSSDIQDYLLYLKGNQDR |
| | AYAPSTQARKMAAIKSFFQFLVAKSVVDQNPASDLISPRVQKYWPKAISVQEVNMLLAAASDSETPEGIR |
| | DRAMLEVLYRTGLRVSELVSLNVDDINLDESHLKCIGRGKTRKVPLSQPAVDVLKLYLERSRPLLVRGQD |
| | EQALFVNHRGQRLTRQGFWLILKAYASEAGIKGITPHTLRHSFAAHMIDGGIDLRQVQEWLGHASITTTQ |
| | VYRQIKSNSHSEKIIDIKSREERIPEEVAK |
| 1309 | WP_059061637.1 |
| | MASIFKRKNKDGTTHWRAVIRVKGYPTVCNHFARKQEADDWAIDVERQIKQGQFNFSKHKNQHTFSELVD |
| | HFINNGALEHHRSAKDSLRHLNYWRERLGNYALVHLTPERLGKERLLLIETPTNRGEKRSSATVNRYMAT |
| | LSSVLSYACRQLRWIDDNPCFNLIKLKENPGRDRVLTQEEVQRLMAACRQSRNGYLYCIVLLAFTTGMRQ |
| | GEILSLTWNQIDFDNKLAHLKETKNGTPRSVPLVEAVIDELR |
| 1310 | WP_056974519.1 |
| | MASIIKRGKSYRVEISNYKHGKNKRISKTFKTKSEAQRWAMQNEIAKGNGVDLALRKDKFSDFYSNWIYL |
| | VKKNDVRSATFLNYTRTIPIVKKLFKNITLGELNDLVVQMKIDEYGETHSRKTTTELLLKIRTSLRYAYG |
| | RGLITSDFAGLIKTRGKELSKRNSALSISDFKKLRSYLLKHHEKDFYILVLLALETGARRGELLGLTNKD |
| | IFKYGISINRSISPSSSDTRLKTKRSKRNISINENVYDILKTVTEKSNGYLFSFDGFQQSAKLARLLKKL |
| | DIPKTTFHGLRDTHASFLFSNDNIRIDYISQRLGHSNLQTTMNYYLELMPEKKHLQDADALSLLDSL |
| 1311 | WP_003330882.1 |
| | MASFRKRGCTCEKKKCTCGAKWEYRIKYVDRQTGKTKEKSKGGFTSKKEAQLAAAEEELKINQFGFAENG |
| | NEVVLNYFSEWLEVFKKPNVKPITYSVQERNVRLNILPRWGKYRLKDITRTEYQKWINELRDHYSEGTVR |
| | RIHSIFSSAIHDAVHEFHIIRENPIQKIKIPKDVENTNRVQYFSKEQLEKFLNSLKTPQKNAKYKHSIQY |
| | YVLFSLMARTGIRIGEALALTWDDFNEKEKSISITKTLVYPLNSTPYISTPKSLKSVRIVKLDEQTVKLL |
| | KKHKINQNEVILRYKNYKASKDNVMFHQHDGRWLRTNVVREYFKEVCKRTDLPVLSPHALRHSHAVHLLE |
| | AGANIKYVSERLGHASTKVTADTYLHITEKIENEALELYSQYIKF |
| 1312 | WP_000876735.1 |
| | MKYNKTKYPNIYYYETAKGKRYYVRRSFFFRGKKREKSKSGLTTLPQARAALVELEQQIQEQELGINTNL |
| | TLDQYWDIYSEKRLSTGRWNDTSYYLNDNLYKNHIKAKFGSTLLKNLDRNEYELFIAEKLQNHTRYTVQT |
| | LNSSFMALLNDAVKNGNLLSNRLKGVFIGQSDIPAANKKVTLKEFKTWIAKAEEIMPKQFYALTYLTIFG |
| | LRRGEVFGLRPMDITQNDSGRAILHLRDSRSNQTLKGKGGLKTKDSERYVCLDDIGTDLIYYLIAEASKI |
| | KRKLGIIKEQHKDYITINEKGGLINPNQLNRNFNLVNEATGLHVTPHMMRHFFTTQSIIAGVPLEQLSQA |
| | LGHTKVYMTDRYNQVEDELAEATTDLFLSHIR |
| 1313 | WP_019821568.1 |
| | MPNKKSSRRKKFERKARNFFNFHYFGLGKNKKEAKGKLRSQSTLFRHVETAAFIQERMGASMLIDITPOM |
| | ALDYLSSRVGKVCSKMLANERRVLERIVYLHEPERRLYIEEKLDPREWVNRAYTHEQIHQIMTHQTPENQ |
| | LATALCFTAGLRVQELLTLQRFDEASASKDRKWRSDLFSGLQGEKYVVKGKGGLYRAVMIPHCLAKKLER |
| | HRLSEPRQIKDRKCTITNRYNITGGKKFTDAFSQLSKRVLGWSHGAHGLRYTYAQDRLNRSIPDKSYEEK |
| | LEIISQELGHFRKEITPHYLHRGTCS |
| 1314 | WP_011239395.1 |
| | MNLDDMLPALASNVAVMDPDALDPLTQQAVDEILAEGTSANTDVSYRTALRYWAAWFALRYRKPLKFPVP |
| | VPAVIQFIVDHAQRSTPGGLRCDLPDSLDEVLVEKGYKAKLGPMALSTLNHRVSVLSSLHKRSPELENPC |
| | RSPAVRDLIARTRRSYAKRGERPKGKAALTRELLEQLVGTCDDSLKGLRDRAILLLGWASGGRRRSEIVS |
| | LRVEDLKRVGPDEFIFELGASKTNQSGTVKADDLKPVVGAAGSALADWLAATGLASGPLFRQIDKSGSLR |
| | GALSASAVRTIVRERCLLAGLDGDFSAHSLRSGFVTEAAKQLIPLGETMALTGHRSIPSVMRYFRAGSVT |
| | TSKAAKLFDEGDKTE |
| 1315 | WP_013695783.1 |
| | MSNIINKLNELEKETNLNLGSSKSLNTLRAYRSDFSDFKNFCSDLNLPYLPTHIKAVSLYMTHLSKSNKY |
| | STLKRRLASINVIHSLKGFHIDTKNPLIKDNLEGIKRKIGIYQNGKKPLLINNLHKIIDVIDYYKIQKYV |
| | RSTRDKAIILIGFSGGFRRSEIVNLKKNDLEFVEEGLKISLRRSKGDQYGEGMIKAIPYFNNKKYCAIIA |
| | LQDWLSARTNNNDLIFPYSDKTVSLILKKYLNIIGLDSRLYSGHSLRSGFATSTASHGADERSIMAMTGH |
| | KSTEMVRRYIKDSNLFKNNALNKLND |
| 1316 | YP_009125517.1 |
| | MASIRSVSRKDGTTFTQVRYRLNGKQTSTSFDDGAHAVEFKRMVEQLGAAKALEVLETTDAASRNFTLAG |
| | WLKHYLDHKTGVEKSTIYDYRKMVEKDITPVLGAIPLAALTAEDVAKWVQGLADKGLAGKTIANKHGFLS |
| | SALNVAASAGHIKANPAVGGAGLVAVPRTERAEMVFLTADQYAKLHDNMPLRWQPLVEFLVASGARWGEV |
| | TALRPSDVNRAEGTVRISRAWKRTYARGGYELGAPKTNKSRRTINVDTAVLDRLDYSGEWLFTNVRGGPV |
| | RGHNFHENHWQPALKKAGLDGLDVKPRIHDLRHTCASWLIAAGVPLPAIQQHLGHESIQVTIGVYGHLDR |
| | SSGRTVAAAIAAALGR |
| 1317 | WP_062041733.1 |
| | MGKTYDVRIWSVRQRKDRGQTSAELRWKTGETPHSQTFRTKTLAEGRRAELLRAAHAGEPFDESTGVPLS |
| | ELRQRNDVSWYQHAREYIEMKWQHSPGSTRRTLAEAMATVTPALVKDTKGMADATTVRTALYSWAFNVSR |
| | RDQDPPDEVAAVLAWFERKSLPTSALADRMQVRAALDTLTRKLDGTTAAASTIRRKRAIFHNALGYAVDA |
| | GRLTDNPLPQVQWKAPEQVAEELDPASVPDPRQALALLDAVRTQSPRGRRLVAFFGCMYYAAARPAEVIG |
| | LRLQDCDLPRRGWGTLQLRETRPRSGSAWTDSGEAHDRRGLKHRPRKAVRTVPIPPDLVNLLRWHVMAYG |
| | VAPDGRLFRTQRGGLIQDTGYGEVWAEARARALTPAQCASLLAKRPYDLRHAAVSTWLSSGVEPQEVAAR |
| | AGHSVAVLFRVYAKCLDGGAATANARIERALKNGS |
| 1318 | WP_044878438.1 |
| | MLLKFAYQDFLDDRRFKNTTEKNIRNYQTMLGAFVEYCIQHEVVSVEDITYNHVRQHLMECQERGNKAGS |
| | INTKIMRIRAFLNYMVECEVITKNPAKRVKMQKEDVKINVFTDEQIRQMLNFYRRIKQRDKSYVAYRDYM |
| | MIVTILGTGIRRGEIISLQWSDIDFVNQTIAVFGKSRRKDTLPITDKLSKELAAYQIFCKQHWGDLSDYV |
| | FVKRDNNQMTENALMLVFKYLGQKMNFKDVRVSAHTFRHTFCHRLAMSGMSAFAIQKLMRHQNIVVTMRY |
| | VAMWGNELREQNDKYNPLNSLNI |
| 1319 | KPU82353.1 |
| | MNKLVVDIKSLELDTLKNLSNAKADNTLRAYKADYRDFLEFCTKHSFKSMPTEPKIVALYLTHLSKYSKF |
| | STLKRRLASISVIHKLKGHYIDTKHPLIMENLLGIKRLRGSNQKAKKPLLINELKTIIDVIDKSKNKFLK |
| | KTRNKSLILLGFAGGFRRSELVSIDYDDIDFVSEGVKIFIKRSKTDQSGEGMIKAIPYFINEQYCPVKNL |
| | KNWINLSDIKTGKVFDISDKSVSLLIKKYAALAGLDEKKYSGHSLRSGFATSTAESGAEERNIMAMTGHK |
| | STQMVRRYIKEANLFKNNALKKLKV |
| 1320 | WP_048499202.1 |
| | MNKKTISQIVEFWKADKKMYVKKSTLSAYILLIENHLIPEFGSNSEIEEEQVQKFVFQKLEQGLSQKTVK |
| | DILIVLKMILKFGAKNKWIQFSPFQIQYPTVRENQQIEVLSRTHQKKVMNFIQEHFTFRNLGIYICLSSG |
| | IRIGEICALTWEDIDTDNGIIHIRKTIQRIYVIENGERRTELLLDSPKTKNSIREIPMSRELLRMLKPFK |
| | KIVNPTFFVLTNDSKPTEPRTYRSYYKNLMRQLEIPEIKFHGLRHSFATRCIESKCDYKTVSVLLGHSNI |
| | STTLNLYVHPNLEQKKKAIDQMFRALK |
| 1321 | YP_195916.1 |
| | MNALVSLDQMMVPAPPDGRKGRNRATSRSQLAAVDDRSAVLAWLARYTDSPATLASYRKEAERLLLWCVL |
| | QRGAALSDLTHEDLLLYQRFLADPQPAERWVMEPGQKPGRNSPRWRPFAGPLWASSLRQALSILNAMFSW |
| | LVEAGHLAGHPLALSRRKRRQAAPRVSRFLPEEHWDVVKAAIEAMPVGSERERLHASRCRWLFSLLYIGG |
| | LRVSEICDARMGGFFSRRGADGRERWWLRNHRQQAARPAWCRPRAILMTELMRYRKAHALSPLPLEGRRH |
| | AIGDDADRPGQAYGTSAIHELVKGVMQAAAAALRRRGSDFGAAAAHLEQASTHWIRHTAGSHLSEKVDLK |
| | VVRDNLGHANISTTSIYLHTEDDARHDATAAGHRVGWRSP |
| 1322 | WP_013397105.1 |
| | MNALVSLDQMMVPAHLDGRKGRNRATSRSQLAAVDDRSAVLAWLARYTDSPATLASYRKEAERLLLWCVL |
| | QRGAALSDLTHEDLLLYQRFLADPQPAERWVMEPGQKPGRNSPRWRPFAGPLGPSSLRQALSILNAMFSW |
| | LVEAGHLAGNPLALSRRKRRQAAPRVSRFLPEEHWDVVKAAIEAMPVGSERERLHASRCRWLFSLLYIGG |
| | LRVSEICDARMGGFFSRRGADGRERWWLEITGKGSKTRLVPATGELMTELMRYRKAHALSPLPLEGEDMP |
| | LVMTLIAPVKPMARSAIHELVKGVMQAAAAALRRRGSDFGAAAAHLEQASTHWIRHTAGSHLSEKVDLKV |
| | VRDNLGHANISTTSIYLHTEDDARHDATAAGHRVGWRSP |
| 1323 | WP_057591291.1 |
| | MNTLVSLDRMMVPIHLDGSRGRNRASSRSQLAAVDDRSAVLAWLARYADSPATLSSYRKEAERLLLWCVL |
| | QRGAALSDLAHEDLLLYQRFLGDPQPAERWVMEPGQKPGRSSSRWRPFAGPLGPSSLRQALSILNAMFSW |
| | LVDAGYLAGNPLALSRRKRRQAAPRVSRFLPEEHWNVVKAAIEAMPVGGERERLHASRCRWLFSLLYIGG |
| | LRVSEICGASMGGFFSRRGSDGRERWWLEITGKGSKTRLVPATGELMSELMRYRKAHALSALPLEGEGTP |
| | LVMTLIAPIKPMARSAIHELVKGVMHAAAAALRQRGSDFEAAATHLEQASTHWIRHTAGSHLSEKVDLKV |
| | VRDNLGHANISTTSIYLHTEDDARHDATAAGHRVGWRSP |
| 1324 | WP_114070645.1 |
| | MKENTVSQNVQATSPNTQLPHVLVGKVADYVRKGLEGSDNTQRAYRSDVYYFIEWCRENGQSEFPATTPT |
| | LSAYVSHLADTHKWASINRKLAAIRKLHELNNVELPTNDRGFKAVMEGIKRTKGIRQKQAPAFQMNELKK |
| | VLRTMETETHAGMRDKSLILLGFAGAYRRSELVDLNIENVEFNEDGAIITLTKSKTNQYGEAEEKAFFYS |
| | PEASLCPIRNLKNWIMRLERTTGPLFVRVRKGDRLTTDRLNDMTVYTTVKKYLGEKYSAHSLRASFITIA |
| | KINGANDSEIMRQSKHKTSLMIQRYTRIEDIKKHNAATKLGL |
| 1325 | WP_120128527.1 |
| | MRRRPRFRGENAMEKADRYLNAGTRENTKKSYRAAIEHFEVTWGGYLPTTGDGIVRYLAEYADQHAISTL |
| | KQRLAALAQWHITQGFPDPTKTPNVRQMIKGIRVIHPARVKQAAPLLLTHLERAINWLENEAAAAQARND |
| | YKVLLRHRRSIAMVLVGFWRGFRGDELTRLTVENTQAYSGEGITFYLPYTKGDRQHEGTTFETPALKTLC |
| | PVEAYLNWITVAGIATGPVFRRIDRWGNLSDKAIQPHSLVPMLRRIFREAGLPEDLYSSHSMRRGFATWA |
| | SANGWDIKALMSYVGWKDMKSALRYVDSSVSFGGLAVRSASARLSNP |
| 1326 | WP_014786680.1 |
| | MTESTEIALWVSQEPETASQAPGLTPAQLQLRQMVLDSVTSPHSRRNYAKALDLLFAFAASRPLTRALLL |
| | EFRTSMEDLAPSTVNVRLAAVRKLVSEARKNGMLSHEDAANLTDIPNVKEKGTRLGNWLTKEQARELLGV |
| | PDRSTLKGKRDYAILALLVGCALRRRELASLTVEDIQMRENRWVIIDLVGKGGRVRTVAIPVWVKKGIDA |
| | WQAAGSIEKGPLLRSVSKGGKIGESLSDWAIWSVVTEAAKEIGIERFGAHDLRRTCAKLCRKAGGDLEQI |
| | KFLLGHSSIQTTERYLGSEQEIAIAVNDSLGL |
| 1327 | WP_065653736.1 |
| | MSNKSIKKIMIAESGAAISTTLSSSSRQFLENTLAQATKRGYAADLKIFFAWAEAHQTAAIPATAETIAN |
| | FLADQASGILSVWLRQESQLINGRPVSVATLRRRLAAIKYAHKLNKIEPSPTDTAEVRETLKGIRRTLGA |
| | KPNAKSALMSQDIQLLIKYIPETITGQRDRAILLLGFAGALRRSELTSLELSDIEVQENGMLVYIRSSKT |
| | DQEQQGQVIGIARSENKANCPVGAIEQWLQSSMILSGPIFRRIFANGKIAITTLSDRTIYNIVKNYCQLA |
| | GLDASRFGAHSLRRGFVTSAAKAKVDPFRIMAVTRHKRLETVKRYVDEANLISDYPGADLLK |
| 1328 | WP_082304040.1 |
| | MSNKSIKKIMIAESGAAISTTLSSSSRQFLENTLAQATKRGYAADLKIFFSLGSEAHQTAAIPATAETIA |
| | NFLADQASGILSVWLRQESQLINGRPVSVATLRRRLAAIKYAHKLNKIEPSPTDTAEVRETLKGIRRTLG |
| | AKPNAKSALMSQDIQLLIKYIPETITGQRDRAILLLGFAGALRRSELTSLELSDIEVQENGMLVYIRSSK |
| | TDQEQQGQVIGIARSENKANCPVGAIEQWLQSSMILSGPIFRRIFANGKIAITTLSDRTIYNIVKNYCQL |
| | AGLDASRFGAHSLRRGFVTSAAKAKVDPFRIMAVTRHKRLETVKRYVDEANLISDYPGADLLK |
| 1329 | WP_076729031.1 |
| | MTLPATLAARARAFADEALSENSRRAYRADWQHYADWCRTHDLEPLPAGPEQVASYLTSMAETHKRATIE |
| | RRLVTIGQAHKLQGLPWVPAHPAVRAALRGMFRRYGRPKKQAAALGVPETLQIVAACEGTVAALRDRALF |
| | LMSFAGAFRRSEIARIRFEDVAFREGAVDVFLPQSKGDQEGEGTIVTVLAGENVATCPVAALRRWLKAAP |
| | TENHIFRAVRADGTVMEAGLHPDSIGRIVQKRAAEAGLVAGPRERISAHGFRAGFITEAYKRGSRDEEIM |
| | SHSRHRDLKTMRGYVRRAKLSDAHPGRNLGL |
| 1330 | WP_012329841.1 |
| | MELDAADPAPGPSRDSFAAPVPFADALPPGLELLIERLEQHARAARGAFADNTLRALAADSRIFAAWCRE |
| | AGRAMLPATPETVAAFIDAQAETKARATVERYRSSVAALHRAAGLQNPCADEIVRLAVKRMNRAKGRRQK |
| | QAEPLNRTSIARMLEVKTPGRLHRRVTEAKREVPLIALRNAALVAVAYDTLLRRSELVSLYIGDLQKGAD |
| | GSGTVLVRRSKADQEGEGAIKYLAPDTVEHIDAWLAAAQLTSGPLFRPLTKGGQVGAGALGAGEVARVFR |
| | EVATAAGLKLARLPSGHSTRVGATQDMFAAGFELLEVMQAGSWKTPAMPARYGERLRAQRGAARKLATLQ |
| | NRA |
| 1331 | KIU27889.1 |
| | MTLPATLAARARAFADEALSENSRRAYRADWQHYADWCRTHDLEPLPAGPEQVASYLTSMAETHKRATIE |
| | RRLVTIGQAHKLQGLPWIPAHPAVRAALRGMFRRYGRPKKQAAALGVPETLQIVAACEGTVAALRDRALF |
| | LMSFAGAFRRSEIARIRFEDVAFREGAVDVFLPQSKGDQEGEGTIVTVLAGENVATCPVAALRRWLKAAP |
| | TENHIFRAVRADGTVMEAGLHPDSIGRIVQKRAAEAGLVAGPRERISAHGFRAGFITEAYRRGSRDEEIM |
| | SHSRHRDLKTMRGYVRRAKLSDAHPGRKLGL |
| 1332 | WP_029361746.1 |
| | MTLPATLAARARAFADEALSENSRRAYRADWQHYADWCRTHDLKPLPAGPEQVASYLTSMAETHKRATIE |
| | RRLVTIGQAHKLQGLPWIPAHPAVRAALRGMFRRYGRPKKQAAALGVPETLQIVAACEGTVAALRDRALF |
| | LMSFAGAFRRSEIARIRFEDVAFREGAVDVFLPQSKGDQEGEGTIVTVLAGENVATCPVAALQRWLKAAP |
| | TENHIFRAVRADGTVMEAGLHPDSIGRIVQKRAAEAGLVAGPRERISAHGFRAGFITEAYKRGSRDEEIM |
| | SHSRHRDLKTMRGYVRRAKLSDAHPGRNLGL |
| 1333 | WP_012329856.1 |
| | MTLPATLAARARAFADEALSENSRRAYRADWQHYADWCRTHDLEPLPAGPEQVASYLTSMAETHKRATIE |
| | RRLVTIGQAHKLQGLPWIPAHPAVRAALRGMFRRYGRPKKQAAALGVPETLQIVAACEGTVAALRDRALF |
| | LMSFAGAFRRSEIARIRFEDVAFREGAVDVFLPQSKGDQEGEGTIVTVLAGENVATCPVAALRRWLKAAP |
| | TENHIFRAVRADGTVMEAGLHPDSIGRIVQKRAAEAGLVAGPRERISAHGFRAGFITEAYRRGSRDEEIM |
| | SHSRHRDLKTMRGYVRRAKLSDAHPGRNLGL |
| 1334 | WP_012010452.1 |
| | MNDQLSDFIHFMTVERGLSENTIVSYKRDLQNYLSFLMTHEQLSDIKDVTRLHIIHYLKQLKEEGKSSKT |
| | SVRHLSSIRSFHQFLLREKVTKDDPSWNIETQKTERKLPKVLSLGEVEKLLDTPNQHTPFDYRDKAMLEL |
| | LYATGIRVSEMLDLTLADVHLTMGFIRCFGKGRKERIVPIGEAAASAIEEYLEKGRGKLLKKQPADALFL |
| | NHHGKKMSRQGFWKNLKKRALEAGIQKELTPHTLRHSFATHLLENGADLRAVQEMLGHADISTTQIYTHV |
| | TKTRLKDVYHKFHPRA |
| 1335 | WP_085361167.1 |
| | MTSVPVLADAVSLPATIAPDLAAAVSYAKAEKAPATRRAYETDFRLFRTYCEEKAASSLPALPETVAAYL |
| | AHGVQEGAKASTLGRRLAAIRYAHKLASLPTPTDSEAVKATLRGIRRTIGAAKVKKAPAVASRIKAMVAA |
| | CPSTIAGKRDRALLLLGFGGAFRRSELVALDVEHIEETSEGLLILIAKSKTDQDAEGVTIAVARGSAETC |
| | PVVALRDWLDAAGIDAGPVFRPINKAGVVSAERLTDQSVALIVKAYARRVGLDAGVFSGHSLRRGFLTSS |
| | AAAGKSIFRMKDVSRHKSVDTLAGYIQEAELFKEHAGAGLL |
| 1336 | WP_007858208.1 |
| | MEKTGREITQELLSGFCIHLEESGYAKATVNKYKADLMQYILFLEGAPVCEEGLSRYREYLEQQYRTSSA |
| | NSKIAAVNAFFKSVGWEYLIPALEPGESLPVMGEELTLSEYRQLLKEAKQQGNLRLYYLIQILSSTKINI |
| | SEHRYVTVEAVSRGYMVIPRGKRSRVIFIPDRLRRQILTYCKKQEIQSGPVFVNWKGTPLDRSNVHKYLK |
| | RLSQNAGVDPEKVNPRSLTRVVEFSSAVYMLDEKMAGEVQDP |
| 1337 | WP_046027227.1 |
| | MDVSNNTNQPISATETRLELTEIASSTQATAEAFIAAGTAANTVRSYRSALAYWEAWLHLRYDRALGDGA |
| | LPAPVVVQFIVDHLARPTPDGTWHHLLPPNIDLALCQTRVKGKPGPLAFNTVSHRLAVLAKWHKLQHWDN |
| | PCAASAVVTLLREAGKAQVRQGVGVRKKTAMTREPLQAMLATCTDGLRGVRDKALLLLAWSGGGRRRSEV |
| | VNLQVGDVRKLDDDTWLYTLGATKTDTGGVRREKPLRGPAAQALSAWLAVAPADCGPLFRRMYKGNKVGV |
| | APLSADQVARIVQRRAKLADLEGDWAAHSLRSGFVTEAGRQGVPLGEVMAMTEHRSVATVMGYFQTGSLL |
| | SSRATELLPKADSKEQGE |
| 1338 | OUV98802.1 |
| | MNKLTTDLKLLHEETLNNLRSSKANNTLRAYKSDFKDFGIFCAKHGLNALPTEPKIVSLYITYLSKNSKI |
| | STLRRRLVSISMVHKLKGHYLDTKNPVIVENLMGIRRVKGSIQKGKKPILIKHLKS1INIINDQKIDEIK |
| | KLRDKSIILIGFGGGFRRTELISIDYEDLEFVPEGLKINIKRSKTDQFGEGMIKGLPLFINEVYCPVSNL |
| | RKWLEVSKIKSGPIFTRFSKGLSLTNKRLTDQSVVLLIKEYLKLAGIENTNFAGHSLRSGFATVAAESGA |
| | DERSIMAMTGHKTTQMVRRYIKEANIFKNNALNKVKI |
| 1339 | WP_075500861.1 |
| | MNELTTELKSLHEATLNNLKSSKANNTLRAYKSDFKDFGIFCAKHGLKTLPSEPKIVSLYLTHLSKNSKI |
| | STLRRRLVSISMVHKLKGHYLDTKHPIIVENLMGIRRVKGSIQKGKKPILISHLKSIINVIDEQKIENIK |
| | KFRDKSLILIGFGGGFRRTELISIDHEDLEFVPEGLKITIRKSKTDQLGEGMIKGLPYFTNETYCPIVNL |
| | KKWLEISKIKSGPIFRRFSKGLSLTDKRLTDQSVVLLMKEYLKLAGIENKNFAGHSLRSGFATVAADSGA |
| | DERSIMAMTGHKSTQMVRRYIREANIFKNNALNKVKI |
| 1340 | WP_011906504.1 |
| | MILMPQDDPALNVIPAGLSPEDDFLPVLAGGELPLSPARAYLLSLNSPRSRQTMASFLNIVAGMLGAASL |
| | ETCSWGSLRRHHVMGVTELLRDTGRATATVNTYLSALKGVAKEAWMLKLMDVESFQHIRAVRNLRGSRLP |
| | RGRALPAEEIGKLFAVCEADATYLGVRDAALLGVILGCGLRRSETVGLSLSDVVTHERALRVLGKGNKER |
| | LAYMPAGTWQRLQTWIDQVRGEAAGPLFTRIRRFDTLTNDRLTDQAVYHILQMRQRQAQIERCAPHDLRR |
| | TFATAMLDNGEDLITVKDAMGHASVTTTQQYDRRGEERLRQARDRLNLT |
| 1341 | WP_014269099.1 |
| | MIASAPFTLCKLSKNDRIYWYALFRDPQTGKRTNKKSVEKLRKELGIQSTQPIKRRDEAILICKQALDAG |
| | LLFGKKTPTTLFDYLSLFFDWEKSPYVEKRNLLDPGSLSQDYISTRQNLVSNHVLPLIHHNLLLSVVTTR |
| | YMEQLQLSLVKKGKLSHATVNICMQAVTMAVREAQRAGLIDASVSIALRPLKCTHRMRGILSEDELSNFM |
| | QYLKTSGEKRMYLACLLSLLTGMRSGELRGLHASSISSGLITVEFAYANKAGLKEPKGKKTRLVPCPAFL |
| | CEELLLLGRSNPFGNGNDLVFWSRRTGSYVSSHYFSEKLQGALVRSKVLEKQEILDRNITFHSLRHMANT |
| | LLRGSVDEHVLRMTIGHSSEQLSDLYTHLSQRGLKSVELAQQNNILPLLGENRE |
| 1342 | WP_002328898.1 |
| | MKNTEIYQKIDTIILHMPDYIKDFVQDREDKDQSPRTTLEYLKNYKLFYEWLLSESIVPDTSITSIRHLT |
| | AYDLNLYKSHLKRRAKENVKKDTTKAKLEDNNNLGLSTSTINRNITALKVLFKYLSKSSNNPLGKPYLED |
| | NPMDQVATITDKTTLAARANAIEKKLFLDEDTQNYLDYIANEYKNTLSKRALIYYHRDVERDLAINALIL |
| | GSGLRLSEVVNINLDDLSLDKNNVVVTRKGNKRDAVNIAAFAMEYLANYLAIRKERYKVTENEKALFLAI |
| | YQGEAKRISGIAIERMVAKYSKGFRVQVSPHKLRHTLATRLYQQTNSLVLTAQQLGHSSTNTTTLYTHID |
| | NAATIDALNSL |
| 1343 | WP_051279402.1 |
| | MTTLTPQPSFSGVPAELQKSFEAAIGYLRAQLAPATLRAYQSDFRIFCDWCERFKLATTPATPETLALFL |
| | SDQADSGVAAVTLERRLASIRYVHQMKELPSPTDHPLVRGTLTGIRRIHGTLPRNQKEPILDHQVFRMLQ |
| | LTPDTLLGLRDRAIIALGFAGAFRRSELAALDVSDLKFDQAGNLVCLIRRGKTDQGGSGFEKPILNGRRL |
| | QPVTHLKAWLSTAGIDEGAVFRRVDWAGAATEQRLSAQWMARVVKNYANQIGLGFTEFGAHSLRSGFITS |
| | AGERDVQLYKIMEVTGQKDPRTVLRYLRRANLFKDHAGEDFL |
| 1344 | WP_058002297.1 |
| | MLDRLKDFIHFMVVEKGLSKNTIVSYERDLKSYLTYMVKVEQIQSLNEITRIHIVHFLHHLKQQGKSAKT |
| | LARHVASIRSFHQFLLREKVTENDPSVHIETPQTERSLPKVLSLTEVEALLDAPSEKGPLPLRDKAMLEL |
| | LYATGIRVSELINLNLDDLHLTMGFVRCIGKGNKERIIPIGKTATVVLEEYIKDGRPKLSSKQRQTEALE |
| | LNHHGNRLTRQGFWKILKGLAKKANIEKELTPHTLRHSFATHLLENGADLRAVQEMLGHADISTTQIYTH |
| | VTKTRLKDVYAKHHPRA |
| 1345 | WP_014080879.1 |
| | MKLPNSYGSVIKLGGKRRKPYAVRISKLVEDDTGKVKRKYTYLAYFSKPEMAYTYLAEYNSGAVVPEHMK |
| | YSDSPTFAEMYEKWKKYRKSLKNQISDSTWRNYEIAFHHFSELHDRKFISIRTNDLQQCLNAYNHKSQTT |
| | ISSMRAVLKAMYQYAKLNEYIDRDLTEGLVYEWTNSTEQIHDRYSDEEIKTLWSKLYEINNVDIILIMIY |
| | TGLRPTELLEIQTENVHLDEKYMVGGMKTEAGKDRIIPLNDKIIPLVKNRYDPNKKYLINNKFGNHYTYG |
| | TYMNGNFNTCMGKLKMKHLPHDGRHTFASLMDSAGANDVCIKLIMGHSMKNDTTKGTYTHKTLEELLTEV |
| | NKI |
| 1346 | WP_034465437.1 |
| | MATEKITKRIVDALKAPKPSRDGVKVREHFVWDRELRGFGVQVMPSGLKSFVIQYRTPEGRNRRAVIGRY |
| | GLMTVEEARKLAHEKLVAVSKGVDPVAEEAKAAGLLTVAEVCDWYLAEAEAGRILGRRRRPIKPSTLAMD |
| | RSRIEAHIKPLLGRRQVASLKLGDVEGAQADIAAGKTSKPRAGSRGGATTGGDGVAARTMSTLHSIFEHA |
| | VRLGKIEANPAKGVRRLASAPRERRLSRSEIERLGKTLRAAAQEGEHPTGLAAIRFLLLTGFRRMEALGL |
| | QRTWLDEEECAIRFPDTKSGAQIRVIGQAAIDLLLDQPKTKSPFFFPADWGEGHFIGVVRVLDRVCQKAG |
| | LADITPHTLRHTYASLAGDLGFSELTIAALLGHSARGVTQRYVHIDEALRMTADQVADEMADLLDGRATP |
| | SRSRSSRRGRSERKLEATGA |
| 1347 | WP_015045988.1 |
| | MAKSGQARVPTAEQQQHLFQVIQEHRHPEKNTAIMQISFKLGLRAQEIALLQIKEVAKLNSLGSGFKLLE |
| | VMSLPAAYTKGADAMNRSKTVYQRRTVSFDVETFNKIIKQVEILAKSGAAVNPEDFYPPLKKHKGKSRDL |
| | PMVDGSLREALTNYIQMRIAKGEVLKPSSPLFITQKGGSYSPNTLQEHMALMLRDWAGIEKASSHSGRRA |
| | LITHIIHKQRKSVKIAQKIAGHVNPSTTLIYEDPPEAVLEDALNDLN |
| 1348 | WP_125440493.1 |
| | MENSSLLPVVVPTRSHSLVELPPSVARYVEAGLHGAENTKRGYAADLRSFQDYCEHHQVLHLPAEVTTVA |
| | GYVSQMADRGMKLATIRRHVAAIAKLHQLAGQPSPTGHEALQVVLDGIARLVGKRQRQAPAFTVAELKQS |
| | IRAMDVTTPTGLRDRALLLLGFAGAFRRSELVALNVEDVELTRQALVIHLRQSKTNQYGLEEDKAVFYSP |
| | SADFCPVRAVQEWIESLGRTSGPLFTRMSRGTQVRPAQPGQHRLTDQSVNDLVQRHLGISYSAHSLRASF |
| | VTIAVEAGQSNKAIKNQTKQKTDAMIERYARLDDVKRFNAAQYLGL |
| 1349 | TDN36797.1 |
| | MENPSSLPVIVPTRSHSLVEMPASVGRYVEAGLQGAANTKRGYAADLRSFEDYCQHHQLSYLPADVSTVA |
| | GYVSQLADRGKKYATIRRHVAAIAKLHQLAGQPSPTSHEALGVVLDGVARVHGKRQRQAPAFTVAELKQA |
| | IRALDLSTPTGLRDRALLLLGFAGAFRRSELVALNVEDVELTRLALVIHLRRSKTNQYGEEEDKAVFYAP |
| | SADYCPVRAVQDWLAVLARPAGPLFTRMSRGTSRRPAQPGTARLSDOSVNDLVQRHLGSSYTAHSLRASF |
| | VTVAVEAGQSNKAIKNQTKQKTDAMIERYARLDDVKRFNAAQYLGL |
| 1350 | WP_133659153.1 |
| | MPASVGRYVEAGLQGAANTKRGYAADLRSFEDYCQHHQLSYLPADVSTVAGYVSQLADRGKKYATIRRHV |
| | AAIAKLHQLAGQPSPTSHEALGVVLDGVARVHGKRQRQAPAFTVAELKQAIRALDLSTPTGLRDRALLLL |
| | GFAGAFRRSELVALNVEDVELTRLALVIHLRRSKTNQYGEEEDKAVFYAPSADYCPVRAVQDWLAVLARP |
| | AGPLFTRMSRGTSRRPAQPGTARLSDQSVNDLVQRHLGSSYTAHSLRASFVTVAVEAGQSNKAIKNQTKQ |
| | KTDAMIERYARLDDVKRFNAAQYLGL |
| 1351 | OUW60929.1 |
| | MKSLVTDLKSLELETLKNLKNSKADNTLRAYESDFKDFAAFCKSNGFSSLPTEPRILALYLTHLSVNSKY |
| | STLKRRLASISVIHRLKGHYIDTKHPLIIENLLGIKRRKGSSQKSKKPILISDLKLIIKAIDQSELKYLK |
| | KLRNKALILTGFSGGFRRSELVAIEHEDIEFVSEGVKIYVKRSKTDQSGEGMIKAIPYFDNEDFCPVTNL |
| | KNWISQGNIQNGKIFNISDKNVVLIIKKFAGLAGLDQNKYAGHSLRSGFATSTAESGAEERSIMSMTGHK |
| | TTOMVRRYIKEANLFKNNALNKIKL |
| 1352 | WP_008916347.1 |
| | METKQINPLIEHFLDTIWLEQDLAENTLASYRIDLQLLDKWLEANELNLENVQSIDLQSFLAERIESGYK |
| | AASSARLLSSIRRLFQYFYREKIRLDDPSAVIAAPKIPQRLPKDLSEQQVEDLLNAPATEDPLELRDKAM |
| | LEVLYACGLRVSELVGLTFSDISLRQGVIRVVGKGDKERLVPLGEEAIYWIEKYIQEGRPDLLKGKASDV |
| | LFPSKRGTKMTRQTFWHRIKHYAVIANIDSESLSPHVLRHAFATHLLNHGADLRVVQMLLGHSDLSTTQI |
| | YTHVATERLRTLHEQHHPRG |
| 1353 | WP_016800355.1 |
| | MRKTVPILTDFVTINSFVEKLNSKATIEIIDELTGHQYSHNSLLGIYSDWNRYHAFCTKHRINTLPASIT |
| | AVRRFLETESNDRKYASLKRYTATLSLLHTVLNFANPIKHRQVRFTLLHLQAQMAGDAKQTNAMTSAHLT |
| | ELNMLLSHQKANLKEVRDIAIYNVMFECALKRSELKALKMNDIESYDEGYQITIKDSAYKLSQVASVALQ |
| | RWLSFTGSEDELPMFRAIDKHENIRLQPLDDSSIYRILRRASDILGLADNHHFSGNSIRVGAAQELSKQG |
| | LKVREIQDFGRWLSPAMPAQYVGYTGTAESEKMKFKAIVPWQ |
| 1354 | WP_029203706.1 |
| | MSIRNLKDGSTKPWLCECYPNGRTGKRVRKKFTTKGEAKAFELHTMKEIDDKPWMGSKTDHRRMSELLDT |
| | WWTIHGHTLKSGKQARELIAKTIEELGNPIASHLKERDYLDYRAARIPYRGKNKSIKISPTTHNTELIYL |
| | KGMFKKLIKYNQWKYPNPLEAIETIKTSEKNLAYLTKPQIEEFLVNLKNFNRVITVSIPQLIVISKICLA |
| | TGARISEALTLTRSQVAEFKLTYTETKGKRNRSVPISPALYQEILDIAVSDHEIFNTSYKDAWRYIKKAL |
| | PEHVPSGQATHVLRHTFASHFMMNKGDILVLQRILGHTKIEQTMAYSHFAPEHLIQAVHLNPLEN |
| 1355 | WP_030064747.1 |
| | MTEIEHYTPAAPPAVRQLSPEAQAALAAGRADSTRRAYAEDRSAYLAWCAERGEQPLPASQDLLVEYVTH |
| | LTLTPRPRTGRPSAPSSLERMLSAITTMHAELDLPKPVTKGARTVIAGYKHKLALDKKPGGKQRQVKPAL |
| | PPALRKMLDALDRDTLIGKRDAAMLLLGYSAATRSSELVGLDIGEPVECDEGYLVSIYRVKMKKFTESAI |
| | PYGKNPATCPVRALRSLIAAMREAGRTEGPLFVRIDRHGRIAPPMVRHGKPIGDPSGRLTADAASDVIER |
| | LAEAAGFMGRWRGHSLRRGFATAAQRGGAPMVRVARQGGWADNSTSLARYFDEGDPWEDNPVTGL |
| 1356 | WP_048474244.1 |
| | MPRSDSQPESPVVAYPGWFTDFLDDRVIRKPSPHTTKAYRQDFEAIATLVAGQAEDVVNLEAAALDKDTL |
| | RAAFAVYARTHSAASIRRCWSTWNTLCTYLFTAELLGANPMPLIGRPKVPKSLPKSYSDNTVTGLVTAID |
| | ADTGSARDSDWPERDRAIVFTALLAGPRAEELIRADIGDVRRTDDGGGVLHVRGKGNKDRRIPFGKELLD |
| | VIEQYLESRVVRFPPARRRVPDSDTLSRFSSNAPLFVGVDGERITRGTLQYRILRAFKRAGINSERPAGA |
| | LVHGLRHTFATELANAHVSVYTLMKLLGHESMVTSQRYVDGAGTETRSATDKNPLYRFLSPRTEYSNQPV |
| | DSRGVQGS |
| 1357 | WP_109314041.1 |
| | MSTHAPYLPAASPALSVEDQEALTDLYVRGTPANTLRAYERDLLYVTAWKTARFDLALRWPESEATALAF |
| | ILDHARDLSDAPSDDHSRQVAEVLIAQGLRKSLACPAPSTLDRRIASWLAFHRMKNLESPFGSPQVNQAR |
| | SKARRAAARPPTPKSAHPITRDILELLLATCRGSRRDCRDRAILILGWASGGRRRSEITGLMFEDVSLKE |
| | FGEKSLVWISLLETKTTAKGKTPPLVLKGRAALALVHWIEVGQIKNGPLFRPVSKADRVLKRRLSPDGIY |
| | QIVKHRLRLAGLPEDFASPHGLRSGFLTQAALDGAPIQTAMRLSLHRSMAQAQKYYDDVDVAENPATDLL |
| | G |
| 1358 | WP_029224390.1 |
| | MSIRNLKDGSTKPWLCECYPNGRTGKRVRKKFTTRGEAKAFELHTMKEIDDKPWMGSKPDHRRMSELLDA |
| | WWTIHGHTLKSGKQARELIAKTIEELGNPIASHLKERDYLDYRAARIPYRGKNKSIKISPTTHNTELIYL |
| | KGMFKKLIKYNQWKYPNPLEAIETIKTSEKNLAYLTKPQIEEFLVNLKNFNRVITVSIPQLIVISKICLA |
| | TGARISEALTLTRSQVAEFKLTYTETKGKRNRSVPISPALYQEILDIAVSDHEIFNTSYKDAWRYIKRAL |
| | PEHVPSGQATHVLRHTFASHFMMNKGDILVLQRILGHTKIEQTMTYSHFAPEHLIQAVHLNPLEN |
| 1359 | WP_010646715.1 |
| | MSTVQAISDKRVVKKAEKYLKRHHDEVYWLIWRIGIETGLRITDITKLSYDNINFESGEVTVIESKGTLA |
| | RQARARHKVLKSVKNELLNYYKRDHAKLLSVYVCDYRNIVDLVPRSWKHSIEVRLEEATKSAPVKKRVAY |
| | LSSRTLTALKKRRKLWLGKDSGLIFSRATLASNRAKRQRGVISRQACWRVFSCLSCCIDELRQHKIGCHS |
| | LRKIFARHLYHSSDMDIGLVATIIGHQSVSTTLRYIGISDEDTKRAQLRLFDYFFA |
| 1360 | WP_021710415.1 |
| | MSIRNLKDGSKKPWLCECYPYGRTGKRVRKRFTTKGEAKAFELHTMKEIDDKPWMGIKPDNRRMSELLET |
| | WWTIHGHTLKSGKQARDLISKTIEELGNPIACQFKERDYLAYRAARIPYRGKNKSIEISPTTHNLELIYL |
| | KGMFKKLIKYNQWKYPNPLEAIEPIKTSEKHLAYLTKPQIEEFFDNLQNCNRVIKASIPQIIVIAKICLA |
| | TGARISEALTLTRTQITELKLTYTDTKGKRNRSVPISPSLYQEILDIAVSDHDIFNTSYKDAWRYIKRAL |
| | PEHVPNGQATHVLRHTFASHFMMNKGDILVLQRILGHTKIEQTMAYSHFAPEHLIQAVHLNPLEN |
| 1361 | WP_011999282.1 |
| | MSVRNLKDGSTKPWICECYPNGRAGKRVRKKFATKGEAKAFELHTMKEIDDKPWMGIKPDNRRMSELLEN |
| | WWTIHGHTLKSGKQAKDLISKTIEELGNPIACQFKERDYLAYRAARTPYRGKNKSIEISPTTHNLELIYL |
| | KGMFKKLIKYNQWKYPNPLEAIEPIKTSEKHLAYLTKPQIDEFFDELQNCKRVIKASIPQIIVIAKICLA |
| | TGARISEALTLTRTQITEFKLTYTDTKGKRNRSVPISPSLYQEILDIAVSDHDIFNTSYKDAWRYIKRAL |
| | PEHVPNGQATHVLRHTFASHFMMNKGDILVLQRILGHTKIEQTMAYSHFAPEHLMQAVHLNPLEN |
| 1362 | WP_050649239.1 |
| | MSVRNLKDGSTKPWICECYPNGRTGKRVRKKFATKGEAKAFELHTMKEIDDKPWMGIKPDHRRMSELLDT |
| | WWNIHGHTLKSGKQARDLIAKTIEELGNPIACQFKERDYLAYRAARIPYRGKNKSIEISPTTHNLELIYL |
| | KGMFKKLIKYNQWKHPNPVESIEPIRTSEKNLAYLTKPQIEEFLFNLKNFNRVITVSIPQLIVISKICLA |
| | TGARISEALTLTRSQVAEFKLTYTETKGKRNRSVPISPALYHEILDIAVNDHKIFDTTYKDAWRYIKRAL |
| | PNHVPSGQATHVLRHTFASHFMMNKGDILVLQRILGHTKIEQTMAYSHFAPEHLMQAVHLNPLEN |
| 1363 | WP_051941091.1 |
| | MIPQDQPLEDTKQGSTLPSAGLEPAAQQAVRELLREGESTNTRNSYQSAMRYWAAWHALRFERQMQLPLD |
| | VPCVLQFIIDHALRQTGAGLASEMPAHMDRALVEAGYKAREGPLSHNTLVHRMAVLSKAHQVHGLANPCQ |
| | DGAVRELMSRTRKAYARRGEQPAKKDALTRDLLEQLLQTCDDSLRGRRDRALLLFAWSSGGRRRSEVAGA |
| | DMRHLRAVGPQEFIYTLAHSKTNQSGRDAPENHKPVTGRAAQALADWLRAAAIQEGPIFRRIRKGGHVGE |
| | PLSPAAVRDIVKQRCALAGVEGDFSAHSLRSGFVTEAGRQNVPLPDTMALTGHSSVNTVLGYFRADSALS |
| | NRAARLLDAGDDDAAAAAQGSGRPQS |
| 1364 | WP_065347010.1 |
| | MGTITTRKRADGSQSYTAQIRLKEGGQIIYSEAQTFSRKVLASEWLRRREYELEQERASGQALHKKVSVG |
| | ELLRDYVSAAENVTEWGRSKKADIARVQASGLADLQATKLTVQDLMGYAKKRRTEDEAGPATVLNDMVWL |
| | RQVFLHASAARGIDAPLQVLDRAKSELLRTRVIAKPAQRSRRLLPEEEAKLLEHFSSRDGRASIPMSDIM |
| | QFALLTARRQEEICRLRWVDVDFEKGVAWLDDVKHPRMKKGNRRCFRVLNAAADIIKSQSREEGVEFVFP |
| | YNNRSVGAAFTRACHVLGIEDLHFHDLRHEATSRLFEKGYSIQEVAQFTLHESWATLKRYTHLRPENVQE |
| | R |
| 1365 | WP_049681475.1 |
| | MNDLTNFNHLTSEQYLTQLQNKLEHRHLLDEHRNLSLSDSSEQDFLELFFSEKVFTPDKEFSPHTIRAYR |
| | SDAKTLLQFLMEHSLSFRNIGFPEVKVYNKYIKEKYAPKSAIRKLEFFRRLLDFGYETQFYKAHLSTWIS |
| | KPTSKKGHYIIEETRLEAEQTRVQVRELNQKDAEYLISCFPKIVKANTNREQLEKRNLLIGYLLYTTGLR |
| | ASELVSLNWGSFRYNRQGHLYADVIGKGKKPRSIPVKDETIELLFDYRKSLGESVEINPEDVNPLFFALY |
| | NKKEPCEHKKRLTYPSLYKIVKEAVHLAGKNSKVSPHWFRHTFVTMLLENDVPLAVVKDWAGHSDISTTN |
| | IYLERVNQDNTHVYLNKVNVFK |
| 1366 | WP_025315261.1 |
| | MAVLTDYKINASKSKAKEYTLKDGNGLFLNIHPNGSKYWLFRFSWNGKQTRMSFGTYPTVDIKQARYLCE |
| | QANFKLLSGIDPRLKENPTIDPVDEVLDEEPKCTFAQFAQHWLEFKMKKLNAKPSKDKKNNGRGSTEIQI |
| | RRAFTNDIFPVLKDKSIHKVTRNDLLCIIRKVEKRGALSVAEKIRSWLDEIFRYAVVTEGLEINPAADLD |
| | IASLPYRRNNRYPFIDVSELPELLVKLSTYQGSRLTILGLRLLLLTGVRTGELRFSEAWQFDLKNALWRI |
| | PASDVKQLQQVIEKVDNRVPDYIVPLSRQALDIVKELLSYHMRGQRYLIANRTNPLEAMSENTLNQALKN |
| | MGFKRRLCTHGIRHTISTALNDLKYDKDFIEAQLSHSDTNKVRATYNHAQYIEPRREMMQEWADLLDKWE |
| | QEVLDKINNK |
| 1367 | WP_038069793.1 |
| | MSENNEKSSSSAPNGSSVNEDNERDHRDGDALSLPSFVAGSGTLDRLVDTARDYARAAASDKTLKAYAKD |
| | WAHFARWCRMKGAEPLPPSPEMIGLYLADLASGSGLSPALSVSTIERRLSGLGWNYAQRGFTLDRKNRHI |
| | ATVLAGIKRKHARPPVQKEAILAEDILAMVATLAFDLRGLRDRAILLLGYAGGLRRSEIVSLDVHKDDTP |
| | DSGGWIEIFDKGALLTLNAKTGWREVEIGRGSKDQTCPVHALEQWLHFAKIDFGPIFVGTSRDGKRALET |
| | RLNDKHVARLIKRTVLDAGIRSDLPEKDRLALFSGHSLRAGLASSAEVDERYVQKQLGHASAEMTRRYQR |
| | RRDRFRVNLTKAAGL |
| 1368 | WP_006861039.1 |
| | MDKNQLTYHEQVKVDNTLRMREILKTMPGFARDYFRAIEPTTSTRTRISYAYDIRVFFQFLLEENPSLRG |
| | KEMTDITLDILDKIKPVDIEEYLEYLKVYQSEDGLKTNGERALKRKMVALRGFYAYYFKREMIKTNPTLL |
| | VDMPKIHDKAIVRLDTDETASLLDYIEHAGDSLSGQKKVYWEKTKRRDLALVTLLLGTGIRVSECVGLDI |
| | GDVDFKNNGIKVVRKGGNEMVVYFGDEVEKALRDYLEERCGITPVAGSENALFLSTQRKRIGVQAVENLV |
| | KKYARQITTTKKITPHKLRSTYGTSLYQETNDIYLVADVLGHKDVNTTKKHYAAMDDQRRRSAASAVHLR |
| | EP |
| 1369 | WP_102369017.1 |
| | MSELDRYLNAATRDNTRRSYRAAIEHFEVNWGGFLPATSDSVARYLVAHAGVLSVNTLKLRLSALAQWHT |
| | SQGFPDPTKAPVVRKVLKGIRALHPAQEKQAEPLQLQHLEQVIQFLEQEGHDARGAEDHPRWLRAKRDAA |
| | LILLGFWRGFRSDELCRLNIEHVQAVPGSGITLYLPRSKSDRENIGRTYQTPALLRLCPVQAYSEWLSAS |
| | ALVRGPVFRGIDRWGNLGEEGLHANSVIPLLRQALERAGIAADQYTSHSLRRGFATWAHRSGWDLKSLMT |
| | YVGWKDMKSAMRYVEATPFLGMTRASLE |
| 1370 | WP_003212574.1 |
| | MSELDRYLNAATRDNTRRSYRAAIEHFEVNWGGFLPATSDSVARYLVAHAGVLSVNTLKLRLSALAQWHT |
| | SQGFPDPTKAPVVRKVLKGIRALHPAQEKQAEPLQLQHLEQVIQFLEQEGHDARGAEDHPRWLRAKRDAA |
| | LILLGFWRGFRSDELCRLNIEHVQAVPDSGITLYLPRSKSDRENIGRTYQTPALLRLCPVQAYSEWLSAS |
| | ALVRGPVFRGIDRWGNLGEEGLHANSVIPLLRQALERAGIAADQYTSHSLRRGFATWAHRSGWDLKSLMT |
| | YVGWKDMKSAMRYVEATPFLGMTRASLE |
| 1371 | WP_102604909.1 |
| | MSELDRYLNAATRDNTRRSYRAAIEHFEANWGGFLPATSDSVARYLVAHAGVLSVNTLKLRLSALAQWHT |
| | SQGFPDPTKAPVVRKVLKGIRALHPAQEKQAEPLQLQHLEQVIQFLEQEGHDARRAEDHPRWLRAKRDAA |
| | LILLGFWRGFRSDELCRLNIEHVQAVPGSGITLYLPRSKSDRENIGRTYQTPALLRLCPVQAYSEWLSAS |
| | ALVRGPVFRGIDRWGNLGEEGLHANSVIPLLRQALERAGIAADQYTSHSLRRGFATWAHRSGWDLKSLMT |
| | YVGWKDMKSAMRYVEATPFLGMTRASLE |
| 1372 | WP_008432517.1 |
| | MSELDRYLNAATRDNTRRSYRAAIEHFEVNWGGFLPATSDSVARYLVAHAGVLSVNTLKLRLSALAQWHT |
| | SQGFPDPTKAPVVRKVLKGIRALHPAQEKQAEPLQLQHLEQVIQFLEQEGHDARRAEDHPRWLRAKRDAA |
| | LILLGFWRGFRSDELCRLNIEHVQAVPGSGITLYLPRSKSDRENIGRTYQTPALLRLCPVQAYSEWLSAS |
| | ALVRGPVFRGIDRWGNLGEEGLHANSVIPLLRQALERAGIAADQYTSHSLRRGFATWAHRSGWDLKSLMT |
| | YVGWKDMKSAMRYVEATPFLGMTRASLE |
| 1373 | WP_002892342.1 |
| | MKQETLMKNINGLLEIMPWYVKEYYQAKLVIPYSYKTLYEYLKEYRRFFEWLIRDHEKLGKTARYADYDT |
| | IADVHIDELAHLPKSIIEAYFVYLRENTERRSISEVSIVRTKDALSSLFKYLTQETEDDEGEPYFYRNVM |
| | VKVKIKKPKDTLASRADNMKEKLFLNDTQSFLDYIDNEHEKKISKRAQVSFVKNKERDLAVIALLLSTGV |
| | RLSELVNLDMQDVNLATRTITVIRKGGKKDVVNIAPFGIPYIERYLEIRKGRYAASDSDKAFFLTTQNKV |
| | PARLGTRSVELLVKKLSTAYGKPTTPHKLRHTLATRLYEQTKDSLLVSQQLGHKGTAMVEVYAHVAAETT |
| | KEALSDL |
| 1374 | WP_002887164.1 |
| | MSKQKDKYLALKRQLPDIIDEYISYLQVDVEEPSPKMVERLSVIQKFLNSYAITIDKEGASLSLTDLEKL |
| | PREFVQNYLANLRLKPAGKRFILYTLAAFWNYLTNTSFTIERGMPLFYRNVFNEWKIVYKESYHNIIYSE |
| | SKKKTILYTQEELEGLLDFMANSYVTTLPTQKKADNWEKEKERNIAIFAIIIGTGASTQEVVNLTVRDID |
| | MRKKGIWVVRNNEKQFIRFLPFTIPYIAPFVKERRGRWDLDPSIPPLFLTMLKKPMGRNTIGHLAKNIGH |
| | AYGKVITPSILKDSHASIVYKETGDIKKVAEIQGYSLDKNHLIRFID |
| 1375 | WP_070578346.1 |
| | MSKQKDKYLALRRQLPDIIDEYISYLQVDVEESSPKMVERLSVIQKFLNSYAITIDKEGASLSLTDLEKL |
| | PREFVQNYLANLRLKPAGKRFILYTLAAFWSFLTNTSFTVERGMPLFYRNVFDEWKIVYKESYHNIIYSE |
| | SKKNTILYTQQELESLLDFMANSYVTTLPTQKKADNWEKEKERNIAIFAIIIGTGASTQEVVNLTVRDID |
| | MRKKGIWVVRNNEKQFIRFLPFTIPYIAPFVKERRGRWDLDPSIPSLFLTMLKKPMGRNTIGHLAKNIGH |
| | AYGKAIAPSILKDSHASIVYKETGDIKKVAEIQGYSLDKNHLIRFID |
| 1376 | WP_011530252.1 |
| | MSVQPGTALQLASKWSRPENRRREGLRAAHTQDADTLIDLLNTYIRLKSSRKGRTSALTLKAYAESVRQF |
| | LAFTGPPESPSRALNQLSAEDFEVWLLHLQEAGLKPNTIKRHLYGVRNLMKALVWANVLKADPSAGVSPP |
| | TDPTPAHAKKRALTQAQMRALLALPGELHPEDSVQASRDALLLALGGTLGLRAAEIVGLDLADVDLATGT |
| | LTVRGKGGKTRVVPLPAGVKALLQRWLPARQTVNPKVPALLVSLSSLNRGGRLSTDGARFIAHAYYRQLG |
| | LPPEMWGLHTLRRTAGTHLYRATRDLHVVADLLGHASVTTSAIYAKMDADVRREAVEALERLQQEGSAAV |
| | QPSRIEQQEDAQQQGGQVA |
| 1377 | WP_005834081.1 |
| | MNQEDVRVSFYLKKSEADEQGECPIMGRLNVGKYSEAAFSMKMTAPESAWLSGRATGKSARSREINRQLD |
| | EIRASALSIYQDLFALREKVSAEEVKCILLGMAYGQETLVAFFLSFIKKFEKKVGINREESTATSYKYAC |
| | GQLMQFLNKEYNLSDIPFTALDRSFIDKYDLYLRTDCQLSAGTILLLTTQLMTVIRKAKSAGILTSNPFA |
| | GYEAERPAREIKYLTEHELERIMSTPLHNRKLYHIRDLFLFSCFTGIPYGDMCRLSDEDLVAVEDGTLWI |
| | KTSRKKTKISYEVPLLDIPLYILEKYRDAAPEGKLLPMYSNSELNNALKTIADLCGIKQRLVFHQARHTS |
| | ATTVLLSNGVPLETVSKILGHERISTTQIYAHVTDDKVENDTRMLDAKIAERFSVAI |
| 1378 | WP_100294115.1 |
| | MTYPDISGSAYSSLQTVFDAQLNSRARRFLRSAKADSTLNAYQADTRIFVFWCQLHGVEPLQASHHHIMN |
| | FLADQADGVLADWVWLDKAEGKGELRHGEPRKPATLVRRLAGIRYAFKQKGIHPMPTEHPDIKEMMRGIV |
| | RLGDNHKRKTGALTLEPLAKVLDGIDTHDLAGLRDHTLLLLMFSGALRRSEAARIEVSDLDFVGQGIRLR |
| | LKPSKHQLHETEIALIPGKHYCPVLALNNWLKKSRINSGPLFRRMNRWGQITPDPLGPQGINLMIKRRTG |
| | HSIDYLYVSGHSLRRGFITSAVTAGKPMNKIIEVTRHKDMRTLQEYFDDAHKFADHALDGLL |
| 1379 | WP_041234271.1 |
| | MAYPSLSNPAHQSLQTVFDAQLNSRARRFLRSAKADSTLNAYQADTRIFVFWCQLHGLDPLQTTHHDIMN |
| | FLADQADGVLADWIWLDKEEGKGELRNGEPRKPATLVRRLAGIRYAFKQKGIHPMPTEHPEIKEMMRGIV |
| | RLGDNRKHKTGALTLQPLTQVLDGIDTGDLAGLRDHTLLLLMFSGALRRSEAARIEVSDLDFVGQGIRLR |
| | LKPSKHQLHETEIALIPGKQYCPVSALQKWLHKSRISEGPLFRRMNRWGQLMAEPLGPQGINLMIKRRTG |
| | QTIDDLYVSGHSLRRGFITSAVTAGKPMNKIIEVTRHKDMRTLQEYFDDAHKFSDHALDGLL |
| 1380 | WP_041202099.1 |
| | MAYPSLSNPAHQSLQTVFDAQLNSRARRFLRSAKADSTLNAYQADTRIFVFWCQLHGLDPLQTTHHDIMN |
| | FLADQADGVLADWVWLDKEEGKGELRNGEPRKPATLVRRLAGIRYAFKQKGIHPMPTEHPEIKEMMRGIV |
| | RLGDNRKRKTGALTLQPLTQVLDGIDTGDLAGLRDHTLLLLMFSGALRRSEAARIEVSDLDFMGQGIRLR |
| | LKPSKHQLHETEIALIPGKHYCPVSALQKWLHKSRISEGPLFRRMNRWGQLMAEPLGPQGINLMIKRRTG |
| | QTIDDLYVSGHSLRRGFITSAVTAGKPMNKIIEVTRHKDMRTLQEYFDDAHKFSDHALDGLL |
| 1381 | WP_088868973.1 |
| | MAYPTLSNPAHQSLQTVFDAQLNSRARRFLRSAKADSTLNAYQADTRIFVFWCQLHGLDPLQTTHHDIMN |
| | FLADQADGVLADWVWLDKEEGKGELRNGEPRKPATLVRRLAGIRYAFKQKGIHPMPTEHPEIKEMMRGIV |
| | RLGDNRKRKTGALTLQPLTQVLDGIDSGDLAGLRDHTLLLLMFSGALRRSEAARIEVSDLDFVRQGIRLR |
| | LKPSKHQLHETEIALIPGKHYCPVSALKKWLHKSRISEGPLFRRMNRWGQLMAEPLGPQGINLMIKRRTG |
| | QTIDDLYVSGHSLRRGFITSAVTAGKPMNKIIEVTRHKDMRTLQEYFDDAHKFSDHALDGLL |
| 1382 | WP_069554870.1 |
| | MAYPSLSNPAHQSLQTVFDAQLNSRARRFLRSAKADSTLNAYQADTRIFVFWCQLHGLDPLQTTHHDIMN |
| | FLADQADGVLADWVWLDKEEGKGELRNGEPRKPATLVRRLAGIRYAFKQKGIHPMPTEHPEIKEMMRGIV |
| | RLGDNRKRKTGALTLQPLTQVLDGIDTRDLAGLRDHTLLLLMFSGALRRSEAARIEVSDLDFVGQGIRLR |
| | LKPSKHQLHETEIALIPGKHYCPVSALQKWLHKSRISEGPLFRRMNRWGQLMAEPLGPQGINLMIKRRTG |
| | QTIDDLYVSGHSLRRGFITSAVTAGKPMNKIIEVTRHKDMRTLQEYFDDAHKFSDHALDGLL |
| 1383 | WP_103252006.1 |
| | MAYPSLSNPAHQSLQTVFDAQLNSRARRFLRSAKADSTLNAYQADTRIFVFWCQLHGLDPLQTTHHNIMN |
| | FLADQADGVLADWVWLDKEEGKGELRNGEPRKPATLVRRLAGIRYAFKQKGIHPMPTEHPEIKEMMRGIV |
| | RLGDNRKHKTGALTLQPLTQVLDGIDTGDLAGLRDHTLLLLMFSGALRRSEAARIEVSDLDFVGQGIRLR |
| | LKPSKHQLHETEIALIPGKHYCPVSALQKWLHKSRISEGPLFRRMNRWGQLMAEPLGPQGINLMIKRRTG |
| | QTIDDLYVSGHSLRRGFITSAVTAGKPMNKIIEVTRHKDMRTLQEYFDDAHKFSDHALDGLL |
| 1384 | WP_127005624.1 |
| | MAYPTLSNPAHQSLQTVFDAQLNSRARRFLRSAKAVSTLNAYQADTRIFVFWCQLHGLDPLQTTHHDIMN |
| | FLADQADGVLAAWVWLDKEEGKGELRNGEPRKPATLVRRLAGIRYAFKQKGIHPMPTEHPEIKEMMRGIV |
| | RLGDNRKRKTGALTLQPLTQVLDGIDTGDLAGLRDHTLLLLMFSGALRRSEAARIEVSDLDFVGQGLRLR |
| | LKPSKHQLHETEIALIPGKHYCPVSALQKWLHKSRISEGPLFRRMNRWGQLMAEPLGPQGINLMIKRRTG |
| | QTIDDLYVSGHSLRRGFITSAVTAGKPMNKIIEVTRHKDMRTLQEYFDDAHKFADHALDGLL |
| 1385 | SIQ01063.1 |
| | MAYPTLSNPAYQSLQTVFDAQLNSRARRFLRSAKAVSTLNAYQADTRIFVFWCQLHGLDPLQTTHHDIMN |
| | FLADQADGVLADWVWLDKEEGKGELRNGEPRKPATLVRRLAGIRYAFKQKGIHPMPTEHPEIKEMMRGIV |
| | RLGDNRKRKTGALTLQPLTQVLDGIDTGDLAGLRDHTLLLLMFSGALRRSEAARIEVSDLDFVGQGLRLR |
| | LKPSKHQLHETEIALIPGKHYCPVSALQNWLHKSRISEGPLFRRMNRWGQLMAEPLGPQGINLMIKRRTG |
| | QTIDDLYVSGHSLRRGFITSAVTAGKPMNKIIEVTRHKDMRTLQEYFDDAHKFSDHALDGLL |
| 1386 | WP_100645880.1 |
| | MAYPTLSNPAHQSLQTVFDAQLNSRARRFLLSAKADSTLNAYQADTRIFVFWCQLHGLDPLQTTHHDIMN |
| | FLADQADGVLADWIWLDKEEGKGELRNGEPRKPATLVRRIAGIRYAFKQKGIHPMPTEHPEIKEMMRGIV |
| | RLGDNRKRKTGALTLQPLTQVLDGIDTRDLAGLRDHTLLLLMFSGALRRSEAARIEVSDLDFMGQGIRLR |
| | LKPSKHQLHETEIALIPGKHYCPVSALQKWLHKSRISEGPLFRRMNRWGQLMAEPLGPQGINLMIKRRTG |
| | QTIDDLYVSGHSLRRGFITSAVTAGKPMNKIIEVTRHKDMRTLQEYFDDAHKFSDHALDGLL |
| 1387 | WP_100653772.1 |
| | MTYPTLSNPAHQSLQTVFDAQLNSRARRFLRSAKADSTLNAYQADTRIFVFWCQLHGLDPLQTTHHDIMN |
| | FLADQADGVLADWVWLDKEEGKGELRNGEPRKPATLVRRLAGIRYAFKQKGIHPLPTEHPEIKEMMRGIV |
| | RLGDNRKRKTGALTLQPLTQVLDGIDTSDLAGLRDHTLLLLMFSGALRRSEAARIEVSDLDFVGQGIRLR |
| | LKPSKHQLHETEIALIPGKHYCPVSALQKWLHKSRISEGPLFRRMNRWGQLMAEPLGPQGINLMIKRRTG |
| | QTIDDLYVSGHSLRRGFITSAVTAGKPMNKIIEVTRHKDMRTLQEYFDDAHKFSDHALDGLL |
| 1388 | WP_041915408.1 |
| | MAYPSLSNPAHQSLQTVFDAQLNSRARRFLRSAKADSTLNAYQADTRIFVFWCQLHGLDPLQTTHHDIMN |
| | FLADQADGVLANWVWLDKEEGKGELRNGEPRKPATLVRRLAGIRYAFKQKGIHPMPTEHPEIKEMMRGIV |
| | RLGDNRKRKTGALTLQPLTQVLDGIDTGDLAGLRDHTLLLLMFSGALRRSEAARIEVSDLDFVGQGIRLR |
| | LKPSKHQLHETEIALIPGKQYCPVSALQKWLHKSRISEGPLFRRMNRWGQLMAEPLGPQGINLMIKRRTG |
| | QTIDDLYVSGHSLRRGFITSAVTAGKPMNKIIEVTRHKDMRTLQEYFDDAHKFSDHALDGLL |
| 1389 | WP_129504075.1 |
| | MAYPTLSNPAHQSLQTVFDAQLNSRARRFLRSAKADSTLNAYQADTRIFVFWCQLHGLDPLQTTHHDIMN |
| | FLADQADGVLADWVWLDKEEGNGELRNGEPRKPATLVRRLAGIRYAFRQKGIHPMPTEHPEIKEMMRGIV |
| | RLGDNRKRKTGALTLQPLTQVLDGIDTGDLAGLRDHTLLLLMFSGALRRSEAARIEVSDLDFVGQGLRLR |
| | LKPSKHQLHETEIALIPGKHYCPVSALQKWLHKSRISEGPLFRRMNRWGQLMAEPLGPQGINLMIKRRTG |
| | QTIDDLYVSGHSLRRGFITSAVTAGKPMNKIIEITRHKDMRTLQEYFDDAHKFSDHALDGLL |
| 1390 | WP_094698459.1 |
| | MNYPRISNPVQQPLQSVFDPQLNSRARRFLRSAKADSTLNAYQADTRIFVFWCQLHGLDPLQTTHHDIMN |
| | FLADQADGILADWVWLDKEEGKGELRNGDPRKPATLVRRLAGIRYAFKQKGIHPMPTEHAEIKEMMRGIV |
| | RLGDNRKRKTGALTLQPLACVLDEIDTGNLAGLRDYTLLLLMFSGALRRSEAARIEVNDLDFVGQGIRLR |
| | LKPSKHQLHETEIALVPGKQYCPVSALARWLKQSRINEGALFRRMNRWGQLTQEPLGPQGINLMIKRRTG |
| | QAIDDLQVSGHSLRRGFITSAVTAGKPMKKIIEVTRHKDIRTLQEYFDDAHKFSDHALDGLL |
| 1391 | WP_106886783.1 |
| | MAYPTISPPAHQSLQTVFDPALNSRARRFLRSAKADSTLNAYQADTRIFVFWCQLHGLDPLQTSHHDIMN |
| | FLADQADGILADWVWLDKEEGKGELRNGEPRKPATLVRRLAGIRYAFKQKGIHPMPTEHAEIKEMMRGIV |
| | RLGDNRKRKTGALTLQPLTRVLDEIDTTNLAGLRDHTLLLLMFSGALRRSEAARIEVSDLDFVGQGIRLR |
| | LKPSKHQLHETEIALIPGKQYCPVTALSRWLKASRISQGPLFRRMTRWGQLTAEPLGPQGINLMIKRRTG |
| | QVIDDLYVSGHSLRRGFITSAVTAGKPMNKIIEVTRHKDMRTLQEYFDDAHKFSDHALAGLL |
| 1392 | WP_017785358.1 |
| | MNYPRISNPVOQPLQSVFDPQLNSRARRFLRSAKADSTLNAYQADTRIFVFWCQLHGLDPLQTTHHDIMN |
| | FLADQADGILADWVWLDKEEGKGELRNGDPRKPATLVRRLAGIRYAFKQKGIHPMPTEHAEIKEMMRGIV |
| | RLGDNRKRKTGALTLQPLACVLDEIDTGNLAGLRDYTLLLLMFSGALRRSEAARIEVDDLDFVGQGIRLR |
| | LKPSKHQLHETEIALVPGKQYCPVSALARWLKQSRISEGALFRRMNRWGQLMQEPLGPQGINLMIKRRTG |
| | QAIDDLQVSGHSLRRGFITSAVTAGKPMNKIIEVTRHKDIRTLQEYFDDAHKFSDHALDGLL |
| 1393 | WP_100858303.1 |
| | MTYPSISNPVHQSLQTVFDPQLNSRARRFLRSAKADSTLNAYEADTRIFVYWCQLQQLDPLQTTHHDIMN |
| | FLADQADGILADWVWLDKREGKGELRNGEPRKPATLVRRLAGIRYAFKQKGIHPMPTEHAEIKEMMRGIV |
| | RLGDNRKRKTGALTLQPLTQVLDEIDTSNLAGLRDHTLLLLMFSGALRRSEAARIEVSDLDFVGQGIRLR |
| | LKPSKHQLHETEIALIPGRHHCPVSALRRWLQKSRINEGPLFRRMNRWGQLMPDPLGPQGINLMIKRRTG |
| | QVIDSLYVSGHSLRRGFITSAVTAGKPMNKIIEVTRHKDMRTLQEYFDDAHKFSDHALDGLL |
| 1394 | WP_123246139.1 |
| | MNYPRISNPVOQPLQSVFDPQLNSRARRFLRSAKADSTLNAYQADTRIFVFWCQLHGLDPLQTTHHDIMN |
| | FLADQADGILADWVWLDKEEGKGELRNGDPRKPATLVRRLAGIRYAFKQKGIHPMPTEHAEIKEMMRGIV |
| | RLGDNRKRKTGALTLKPLACVLDEIDASNLAGLRDYTLLLLMFSGALRRSEAARIEVDDLDFVGQGIRLR |
| | LKPSKHQLHETEIALVPGKQYCPVSALARWLKQSRIHEGALFRRMNRWGQLMQEPLGPQGINLMIKRRTG |
| | QAIDDLQVSGHSLRRGFITSAVTAGKPMNKIIEVTRHKDIRTLQEYFDDAHKFSDHALDGLL |
| 1395 | WP_043162717.1 |
| | MNYPHIQAQTQQALQSVFDPQLNSRARRFLRSAKADSTLNAYQADTRIFVFWCQLHGLDPLQTTHHDIMN |
| | FLADQADGILADWVWLDKEEGKGELRNGEPRKPATLVRRLAGIRYAFKQKGIHPMPTEHAEIKEMMRGIV |
| | RLGDNRKRKTGALTLKPLARVLDEIDTGNLAGLRDYTLLLLMFSGALRRSEAARIEVDDLDFVGLGIRLR |
| | LKPSKHQLHETEIALVPGKQYCPVSALARWLKQSRISEGALFRRINRWGQLMQEPLGPQGINLMIKRRTG |
| | QAIDDLQVSGHSLRRGFITSAVTAGKPMNKIIEVTRHKDIRTLQEYFDDAHKFSDHALDGLL |
| 1396 | WP_124249452.1 |
| | MNYPRISNPVOQPLQSVFDPQLNSRARRFLRSAKADSTLNAYQADTRIFVFWCQLHELDPLQTTHHDIMN |
| | FLADQADGILADWVWLDKEEGKGELRNGDPRKPATLVRRLAGIRYAFKQKGIHPMPTEHAEIKEMMRGIV |
| | RLGDNRKRKTGALTLQPLACVLDEIDTGNLAGLRDYTLLLLMFSGALRRSEAARIEVDDLDFVGQGIRLR |
| | LKPSKHQLHETEIALVPGKQYCPVSALARWLKQSRISEGALFRRMNRWGQLMQEPLGPQGINLMIKRRTG |
| | QAIDDLQVSGHSLRRGFITSAVTAGKPMNKIIEVTRHKDIRTLQEYFDDAHKFSDHALDGLL |
| 1397 | WP_096119502.1 |
| | MAYPTVLPPVYQSLQTVFDPQLNSRARRFLRSAKADSTLNAYQADTRIFVFWCQLHGLDPLQTTHHDIMN |
| | FLADQADGILADWVWLDKEEGKGELRNGEPRKPATLVRRLAGIRYAFKQKGIHPMPTEHAEIKEMMRGIV |
| | RLGDNRKRKTGALTLQPLGRVLDEIDTSNLAGLRDHTLLLLMFSGALRRSEAARIEVSDLDFVGQGIRLR |
| | LKPSKHQLHETEIALIPGKQYCPVSALHTWLKKSRIGEGALFRRMNRWGQLMSDPLGPQGINLMIKRRTG |
| | QAIDDLYVSGHSLRRGFITSAVTAGKPMNKIIEVTRHKDMRTLQEYFDDAHKFSDHALDGLL |
| 1398 | WP_084202652.1 |
| | MTHSTFPSPAQHSLQAVFDSQLNSRARRFLRSAKAGSTLNAYQADTRIFVFWCQLHGLDPLQSTHHDIMN |
| | FLADQADGILADWVWLDKEEGKGELRNGEPRKPATLVRRLAGIRYAFKQKGIHPMPTEHAEIKEMMRGIV |
| | RLGDNRKRKTGALTLTPLACVLDEIDTNSLAGLRDYTLLLLMFSGALRRSEAARIEVDDLQFVGQGIRLR |
| | LKPSKHQLHESEIALIPGQHYCPVSALQCWLKKSRIEAGPLFRRMNRWGQLTADPLGPQGINLMIKRRTG |
| | QAIDDLHVSGHSLRRGFITSAVTAGKPMNKIIEVTRHKDMRTLQEYFDDAHKFSDHALAGLL |
| 1399 | WP_039215813.1 |
| | MNYPHIQVQTQQALQSVFDPQLNSRARRFLRSAKADSTLNAYQADTRIFVCWCQLHELDPLQTTHHDIMN |
| | FLADQADGILADWVWLDKEEGKGELRNGEPRKPATLVRRLAGIRYAFKQKGIHPMPTEHSEIKEMMRGIV |
| | RLGDNRKRKTGALTLKPLACVLDEIDTGNLAGLRDYTLLLLMFSGALRRSEAARIEVDDLDFVGQGIRLR |
| | LKPSKHQLHETEIALVPGKQYCPVSALARWLKQSSISEGALFRRMNRWGQLMQEPLGPQGINLMIKRRTG |
| | QAIDDLQVSGHSLRRGFITSAVTAGKPMNKIIEVTRHKDIRTLQEYFDDAHKFSDHALDGLL |
| 1400 | WP_124251491.1 |
| | MNYPHIQAQTQQALQSVFDPQLNSRARRFLRSAKADSTLNAYQADTRIFVFWCQLHGLDPLQTTHHDIMN |
| | FLADQADGILADWIWLDKEEGKGELRNGEPRKPATLVRRLAGIRYAFKQKGIHPMPTEHAEIKEMMRGIV |
| | RLGDNRKRKTGALTLKPLACVLDEIDTGNLAGLRDYTLLLLMFSGALRRSEAARIEVDDLDFVGQGIRLR |
| | LKPSKHQLHETEIALVPGKQYCPVSALARWLKQSRISEGALFRRMNRWGQLMQEPLGPQGINLMIKRRTG |
| | QAIDDLQVSGHSLRRGFITSAVTAGKPMNKIIEVTRHKDIRTLQEYFDDAHKFSDHALDGLL |
| 1401 | WP_025201727.1 |
| | MNYPHIQAQTQQALQSVFDPQLNSRARRFLRSAKADSTLNAYQADTRIFVFWCQLHGLDPLQTTHHHIMN |
| | FLADQADGILADWIWLDKEEGKGELRNGEPRKPATLVRRLAGIRYAFKQKGIHPMPTEHAEIKEMMRGIV |
| | RLGDNRKRKTGALTLKPLACVLDVIDTGNLAGLRDYTLLLLMFSGALRRSEAARIEVDDLDFVGQGIRLR |
| | LKPSKHQLHETEIALVPGKQYCPVSALARWLKQSRISEGALFRRMNRWGQLMQEPLGPQGINLMIKRRTG |
| | QAIDDLQVSGHSLRRGFITSAVTAGKPMNKIIEVTRHKDIRTLQEYFDDAHKFSDHALDGLL |
| 1402 | WP_125729907.1 |
| | MAYPTVSPPVYQSLQTVFDPQLNSRARRFLRSAKADSTLNAYQADTRIFVFWCQLHGLDPLQTTHHDIMN |
| | FLADQADGILADWVWLDKEEGKGELRNGEPRKPATLVRRLAGIRYAFKQKGIHPMPTEHAEIKEMMRGIV |
| | RLGDNRKRKTGALTLQPLARVLDEIDTSNLAGLRDHTLLLLMFSGALRRSEAARIEVSDLDFVGQGIRLR |
| | LKPSKHQLHETEIALIPGKQYCPVSALHTWLKKSRIGEGALFRRMNRWGQLMSEPLGPQGINLMIKRRTG |
| | QAIDDLYVSGHSLRRGFITSAVTAGKPMNKIIEVTRHKDMRTLQEYFDDAHKFSDHALDGLL |
| 1403 | WP_043122983.1 |
| | MNYPHIQAQTQQALQSVFDPQLNSRARRFLRSAKADSTLNAYQADTRIFVFWCQLHGLDPLQTTHHDIMN |
| | FLADQADGILADWVWLDKEEGKGELRNGEPRKPATLVRRLAGIRYAFKQKGIHPMPTEHAEIKEMMRGIV |
| | RLGDNRKRKTGALTLKPLACVLDEIDTGNLAGLRDYTLLVLMFSGALRRSEAARIEVDDLNFVGQGIRLR |
| | LKPSKHQLHETEIALVPGKQYCPVSALARWLKQSRISEGALFRRMNRWGQLMQEPLGPQGINLMIKRRTG |
| | QAIDDLQVSGHSLRRGFITSAVTAGKPMNKIIEVTRHKDIRTLQEYFDDAHKFSDHALDGLL |
| 1404 | WP_073350284.1 |
| | MNYPHIQSQTQQALQSVFDPQLNSRARRFLRSAKADSTLNAYQADTRIFVFWCQLHGLDPLQTTHHHIMN |
| | FLADQADGILADWVWLDKEEGKGELRNGEPRKPATLVRRLAGIRYAFKQKGIHPMPTEHAEIKEMMRGIV |
| | RLGDNRKRKTGALTLKPLACVLDEIDTGNLAGLRDYTLLLLMFSGALRRSEAARIEVDDLDFVGQGIRLR |
| | LKPSKHQLHETEIALVPGKQYCPVSALARWLKQSRISEGALFRRMNRWGQLMPEPLGPQGINLMIKRRTG |
| | QAIDDLQVSGHSLRRGFITSAVTAGKPMNKIIEVTRHKDIRTLQEYFDDAHKFSDHALDGLL |
| 1405 | WP_103470761.1 |
| | MAYPTLSPSAHQSLQTVFDPQLNSRARRFLRSAKADSTLNAYQADTRIFVFWCQLHGLDPLQTTHHDIMN |
| | FLADQADGILADWVWLDKEEGKGELRNGEPRKPATLVRRLAGIRYAFKQKGIHPMPTEHAEIKEMMRGIV |
| | RLGDNRKRKTGALTLQPLARVLDEIDTSSLAGLRDHTLLLLMFSGALRRSEAARIEVSDLDFVGQGIRLR |
| | LKPSKHQLHETEIALIPGKQYCPVSALHTWLKKSRIGEGALFRRMNRWGQLMSDPLGPQGINLMIKRRTG |
| | QAIDDLYVSGHSLRRGFITSAVTAGKPMNKIIEVTRHKDMRTLQEYFDDAHKFSDHALDGLL |
| 1406 | WP_043134801.1 |
| | MAYPTLAPSAHQSLQTVFDPQLNSRARRFLRSAKADSTLNAYQADTRIFVFWCQLHGLDPLQTTHHDIMN |
| | FLADQADGILADWVWLDKEEGKGELRNGEPRKPATLVRRLAGIRYAFKQKGIHPMPTEHAEIKEMMRGIV |
| | RLGDNRKRKTGALTLQPLARVLDEIDTSNLAGLRDHTLLLLMFSGALRRSEAARIEVSDLDFVGQGIRLR |
| | LKPSKHQLHETEIALIPGKQYCPVSALHTWLKKSRIGEGALFRRMNRWGQLMSEPLGPQGINLMIKRRTG |
| | QAIDDLYVSGHSLRRGFITSAVTAGKPMNKIIEVTRHKDMRTLQEYFDDAHKFSDHALDGLL |
| 1407 | WP_125606695.1 |
| | MAYPTVSPPVCQSLQTVFDPQLNSRARRFLRSAKADSTLNAYQADTRIFVFWCQLHGLDPLQTTHHDIMN |
| | FLADQADGILADWVWLDKEEGKGELRNGEPRKPATLVRRLAGIRYAFKQKGIHPMPTEHAEIKEMMRGIV |
| | RLGDNRKRKTGALTLQPLARVLDEIDTSNLAGLRDHTLLLLMFSGALRRSEAARIEVSDLDFVGQGIRLR |
| | LKPSKHQLHETEIALIPGKQYCPVSALHTWLKKSRIGEGALFRRMNRWGQLMSEPLGPQGINLMIKRRTG |
| | QAIDDLHVSGHSLRRGFITSAVTAGKPMNKIIEVTRHKDMRTLQEYFDDAHKFSDHALDGLL |
| 1408 | WP_098984054.1 |
| | MAYPTLAPSAHQSLQTVFDPQLNSRARRFLRSAKADSTLNAYQADTRIFVFWCQLHGLDPLQTTHHDIMN |
| | FLADQADGILADWVWLDKEEGKGELRNGEPRKPATLVRRLAGIRYAFKQKGIHPMPTEHAEIKEMMRGIV |
| | RLGDNRKRKTGALTLQPLARVLDEIDTSSLAGLRDHTLLLLMFSGALRRSEAARIEVSDLDFVGQGIRLR |
| | LKPSKHQLHETEIALIPGKQYCPVSALHTWLKKSRIGEGALFRRMNRWGQLMSEPLGPQGINLMIKRRTG |
| | QAINDLYVSGHSLRRGFITSAVTAGKPMNKIIEVTRHKDMRTLQEYFDDAHKFSDHALDGLL |
| 1409 | WP_101149134.1 |
| | MNYPHIQAQTQQALQSVFDPQLNSRARRFLRSAKADSTLNAYQADTRIFVCWCQLHGLDPLQTTHHHIMN |
| | FLADQADGILADWVWLDKEEGRGELRNGEPRKPATLVRRLAGIRYAFKQKGIHPMPTEHAEIKEMMRGIV |
| | RLGDNRKRKTGALTLKPLACVLDEIDTGNLAGLRDYTLLLLMFSGALRRSEAARIEVDDLDFVGQGIRLR |
| | LKPSKHQLHETEIAMVPGKQYCPVSALARWLKQSRISEGALFRRMNRWGQLMQEPLGPQGINLMIKRRTG |
| | QAIDDLQVSGHSLRRGFITSAVTAGKPMNKIIEVTRHKDIRTLQEYFDDAHKFSDHALDGLL |
| 1410 | WP_087755718.1 |
| | MAYPTVSPPIYQSLQTVFDPQLNSRARRFLRSAKADSTLNAYQADTRIFVFWCQLHGLDPLQTTHHDIMN |
| | FLADQADGILADWVWLDKEEGKGELRNGEPRKPATLVRRLAGIRYAFKQKGIHPMPTEHAEIKEMMRGIV |
| | RLGDNRKRKTGALTLQPLARVLDEIDTSNLAGLRDHTLLLLMFSGALRRSEAARIEVSDLDFVGQGIRLR |
| | LKPSKHQLHETEIALIPGKQYCPVSALHTWLKKSRIGEGALFRRMNRWGQLMSDPLGPQGINLMIKRRTG |
| | QVIDDLHVSGHSLRRGFITSAVTAGKPMNKIIEVTRHKDMRTLQEYFDDAHKFSDHALDGLL |
| 1411 | WP_080891334.1 |
| | MNYPHIQAQTQQALQSVFDPQLNSRARRFLRGAKADSTLNAYQADTRIFVFWCQLHGLDPLLTTHHHIMN |
| | FLADQADGILADWVWLDKEEGKGELRNGEPRKPATLVRRLAGIRYAFKQKGIHPMPTEHAEIKEMMRGIV |
| | RLGDNRKRKTGALTLKPLACVLDEIDTGNLAGLRDYTLLLLMFSGALRRSEAARIEVDDLDFVGQGIRLR |
| | LKPSKHQLHETEIALVPGKQYCPVSTLARWLKQSRISEGALFRRMNRWGQLMQEPLGPQGINLMIKRRTG |
| | QAIDDLQVSGHSLRRGFITSAVTAGKPMNKIIEVTRHKDIRTLQEYFDDAHKFSDHALDGLL |
| 1412 | WP_111587863.1 |
| | MAYPTVSPPVYQSLQTVFDPQLNSRARRFLRSAKADSTLNAYQADTRIFVFWCQLHGLDPLQTTHHDIMN |
| | FLADQADGILADWVWLDKEEGKGELRNGEPRKPATLVRRLAGIRYAFKQKSIHPMPTEHAEIKEMMRGIV |
| | RLGDNRKRKTGALTLQPLARVLDEIDTSNLAGLRDHTLLLLMFSGALRRSEAARIEVSDLDFVGQGIRLR |
| | LKPSKHQLHETEIALIPGKQYCPVSALHTWLKKSRIGEGALFRRMNRWGQLMSDPLGPQGINLMIKRRTG |
| | QAIDDLYVSGHSLRRGFITSAVTAGKPMNKIIEVTRHKDMRTLQEYFDDAHKFSDHALDGLL |
| 1413 | ABO90113.1 |
| | MAYPTVSPPVYQSLQTVFDPQLNSRARRFLRSAKAVSTLNAYQADTRIFVFWCQLHGLDPLQTTHHDIMN |
| | FLADQADGILADWVWLDKEEGKGELRNGEPRKPATLVRRLAGIRYAFKQKGIHPMPTEHAEIKEMMRGIV |
| | RLGDNRKRKTGALTLQPLGRVLDEIDTSNLAGLRDHTLLLLMFSGALRRSEAARIEVSDLDFVGQGIRLR |
| | LKPSKHQLHETEIALIPGKQYCPVSALHTWLKKSRIGEGALFRRMNRWGQLMSEPLGPQGINLMIKRRTG |
| | HRRSLCQWPQPATGIHHLGRHRRQAHEQDH |
| 1414 | WP_103243121.1 |
| | MNYPRLQNPVQQSLQSVFDPQLNSRARRFLRSAKADSTLNAYQADTRIFVSWCQLHGLEPLQTTHHDIMN |
| | FLADQADGILANWVWLDKEEGKGELRNGEPRKPATLVRRLAGIRYAFKQKGIHPMPTEHAEIKEMMRGIV |
| | RLGDNRKRKTGALTLKPLACVLDEIDTSNLAGLRDYTLLLLMFSGALRRSEAARIEVDDVQFVGQGIRLR |
| | LKPSKHQLHESEIALIPGTRYCPVSALQQWLKKSRIAEGPLFRRMNRWGQLMADPLGPQGINLMIKRRTG |
| | QAIDDLHVSGHSLRRGFITSAVTAGKPMNKIIEVTRHKDMRTLQEYFDDAHKFSEHALDGLL |
| 1415 | WP_124243812.1 |
| | MNYPRLQNPVQQSLQSVFDPQLNSRARRFLRSAKADSTLNAYQADTRIFVSWCQLHGLDPLQTTHHDIMN |
| | FLADQADGILANWVWLDKEEGKGELRNGEPRKPATLVRRLAGIRYAFKQKGIHPMPTEHAEIKEMMRGIV |
| | RLGDNRKRKTGALTLKPLACVLDAIDTSNLAGLRDYTLLLLMFSGALRRSEAARIEVDDVQFVGQGIRLR |
| | LKPSKHQLHESEIALIPGTRYCPVSALQQWLKRSRIAEGPLFRRMNRWGQLMADPLGPQGINLMIKRRTG |
| | QAIDDLHVSGHSLRRGFITSAVTAGKPMNKIIEVTRHKDMRTLQEYFDDAHKFSDHALDGLL |
| 1416 | WP_042878486.1 |
| | MNYPRLQNPVQQSLQSVFDPQLNSRARRFLRSAKADSTLNAYQADTRIFVSWCQLHGLDPLQTTHHDIMN |
| | FLADQADGILANWVWLDKEEGKGELRNGEPRKPATLVRRLAGIRYAFKQKGIHPMPTEHAEIKEMMRGIV |
| | RLGNNRKRKTGALTLKPLACVLDEIDTSNLAGLRDYSLLLLMFSGALRRSEAARIEVNDVQFVGQGIRLR |
| | LKPSKHQLHESEIALIPGTRYCPVSALQQWLKKSRIAEGPLFRRMNRWGQLMADPLGPQGINLMIKRRTG |
| | QAIDDLHVSGHSLRRGFITFAVTAGKPMNKIIEVTRHKDMRTLQEYFDDAHKFSDHALDGLL |
| 1417 | WP_005347025.1 |
| | MGRPRKSDTWLPPRVYRGKSAFEFHPRSGGAIRLAPLAATQSAVWAAYEHMMAEQDGDTIKRLVHEFFES |
| | ADFNDLSATTQKDYRKYSIPVIKVFGGMDPARVESPHIRKYMDKRGQNSKVQANREKAFFSRVFRWAYER |
| | GKVKSNPCQGVRQFKEKARTRYITDLEFQAVMDAARPAVRVAMELSYLCAARKGDVLAMRWSQVGEEGIT |
| | IQQSKTSKIQIKAWSPRLIAAIEQAKQLAGSVVRSSYVICKPNGTPYTDNGFNAAWREAVLTAREQTGWP |
| | MDFTFHDIKAKAISDVEGSSRDKQRISGHKTEAQVAAYDRSIEVVPAVDSVKKR |
| 1418 | WP_042062922.1 |
| | MQTVFDAQLNSRARRFLRSAKADSTLNAYQADTRIFVFWCQLHGLDPLQTTHHDIMNFLADQADGVLADW |
| | VWLDKEEGKGELRNGEPRKPATLVRRLAGIRYAFKQKGIHPMPTEHPEIKEMMRGIVRLGDNRKRKTGAL |
| | TLQPLTQVLDGIDTHDLSGLRDHTLLLLMFSGALRRSEAARIEVSDLDFVGQGIRLRLKPSKHQLHETEI |
| | ALIPGKHYCPVSALQNWLRKSRISEGPLFRRMNRWGQLMTEPLGPQGINLMIKRRTGQAIDDLYVSGHSL |
| | RRGFITSAVTAGKPMNKIIEVTRHKDMRTLQEYFDDAHKFSDHALDGLL |
| 1419 | WP_042055087.1 |
| | MQTVFDAQLNSRARRFLRSAKADSTLNAYQADTRIFVFWCQLHGLDPLQTTHHDIMNFLADQADGVLADW |
| | VWLDKEEGKGKLRNGEPRKPATLVRRLAGIRYAFKQKGIHPMPTEHPEIKEMMRGIVRLGDNRKRKTGAL |
| | TLQPLTQVLDGIDTGDLAGLRDHTLLLLMFSGALRRSEAARIEVSDLDFVGQGIRLRLKPSKHQLHETEI |
| | ALIPGKQYCPVSALQKWLHKSRISEGPLFRRMNRWGQLMAEPLGPQGINLMIKRRTGQTIDDLYVSGHSL |
| | RRGFITSAVTAGKPMNKIIEVTRHKDMRTLQEYFDDAHKFSDHALDGLL |
| 1420 | WP_075113648.1 |
| | MQTVFDAQLNSRARRFLRSAKADSTLNAYQADTRIFVFWCQLHGLDPLQTTHHDIMNFLADQADGVLADW |
| | VWLDKEEGKGELRNGEPRKPATLVRRLAGIRYAFKQKGIHPMPTEHPEIKEMMRGIVRLGDNRKRKTGAL |
| | TLQPLTQVLDGIDTHDLAGLRDHTLLLLMFSGALRRSEAARIEVSDLDFVGQGIRLRLKPSKHQLHETEI |
| | ALIPGKHYCPVSALQNWLHKSRISEGPLFRRMNRWGQLMAEPLGPQGINLMIKRRTGQAIDNLYVSGHSL |
| | RRGFITSAVTAGKPMNKIIEVTRHKDMRTLQEYFDDAHKFSEHALDGLL |
| 1421 | WP_069526884.1 |
| | MQTVFDAQLNSRARRFLRSAKADSTLNAYQADTRIFVFWCQLHGLDPLQTTHHDIMNFLADQADGVLADW |
| | IWLDKEEGKGELRNGEPRKPATLVRRLAGIRYAFKQKGIHPMPTEHPEIKEMMRGIVRLGDNRKRKTGAL |
| | TLQPLTQVLDGIDTHDLAGLRDHTLLLLMFSGALRRSEAARIEVSDLDFVGQGIRLRLKPSKHQLHETEI |
| | ALIPGKHYCPVSALQKWLHKSRISEGPLFRRMNRWGQLMAEPLGPQGINLMIKRRTGQTIDDLYVSGHSL |
| | RRGFITSAVTAGKPMNKIIEVTRHKDMRTLQEYFDDAHKFSDHALDGLL |
| 1422 | WP_050547838.1 |
| | MQTVFDAQLNSRARRFLRSAKADSTLNAYQADTRIFVFWCQLHGLDPLQTTHHDIMNFLADQADGVLADW |
| | IWLDKEGGKGELRNGEPRKPATLVRRLAGIRYAFKQKGIHPMPTEHPEIKEMMRGIVRLGDNRKRKTGAL |
| | TLQPLIQVLDGIDTNDLAGLRDHTLILLMFSGALRRSEAARIEVSDLDFMGQGIRLRLKPSKHQLHETEI |
| | ALIPGKHYCPVSALQKWLHKSRISEGPLFRRMNRWGQLMAEPLGPQGINLMIKRRTGQTIDDLYVSGHSL |
| | RRGFITSAVTAGKPMNKIIEVTRHKDMRTLQEYFDDAHKFSDHALDGLL |
| 1423 | WP_076491768.1 |
| | MQTVFDAQLNSRARRFLRSAKAVSTLNAYQADTRIFVFWCQLHGLDPLQTTHHDIMNFLADQADGVLADW |
| | VWLDKEEGKGELRNGEPRKPATLVRRLAGIRYAFKQKGIHPMPTEHPEIKEMMRGIVRLGDNRKRKTGAL |
| | TLQPLTQVLDGIDTGDLAGLRDHTLLLLMFSGALRRSEAARIEVSDLDFVGQGLRLRLKPSKHQLHETEI |
| | ALIPGKHYCPVSALQNWLHKSRISEGPLFRRMNRWGQLMAEPLGPQGINLMIKRRTGQTIDDLYVSGHSL |
| | RRGFITSAVTAGKPMNKIIEVTRHKDMRTLQEYFDDAHKFSDHALDGLL |
| 1424 | SQH59660.1 |
| | MQSVFDPQLNSRARRFLRSAKADSTLNAYQADTRIFVSWCQLHGLDPLQTTHHDIMNFLADQADGILANW |
| | VWLDKEEGKGELRNGEPRKPATLVRRLAGIRYAFKQKGIHPMPTEHAEIKEMMRGIVRLGDNRKRKTGAL |
| | TLKPLACVLDEIDTSNLAGLRDYTLLLLMFSGALRRSEAARIEVNDVQFVGQGIRLRLKPSKHQLHESEI |
| | ALIPGTRYCPVSALQQWLKKSRIAEGPLFRRMNRWGQLMADPLGPQGINLMIKRRTGQAIDDLHVSGHSL |
| | RRGFITSAVTAGKPMNKIIEVTRHKDMRTLQEYFDDAHKFSDHALDGLL |
| 1425 | WP_071910168.1 |
| | MQTVFDAQLNSRARRFLRSAKANSTLNAYQADTRIFVFWCQLHGLDPLQTTHHDIMNFLADQADGVLADW |
| | VWLNKEEGRGELRNGEPRKPATLVRRLAGIRYAFKQKGIHPMPTEHPEIKEMMRGIVRLGDNRKRKTGAL |
| | TLQPLTQVLDGIDTNDLAGLRDHTLLLLMFSGALRRSEAARIEVSDLDFVGQGIRLRLKPSKHQLHETEI |
| | ALIPGKHYCPVAAIGNWLKKSRINEGPLFRRMNRWGQLTPDPLGPQGINLMIKRRTGQAIDDLYVSGHSL |
| | RRGFITSAVTAGKPMNKIIEVTRHKDMRTLQEYFDDAHKFSDHALDGLL |
| 1426 | 0FC44115.1 |
| | MQSVFDPQLNSRARRFLRSAKADSTLNAYQADTRIFVCWCQLHELDPLQTTHHDIMNFLADQADGILADW |
| | VWLDKEEGKGELRNGEPRKPATLVRRLAGIRYAFKQKGIHPMPTEHSEIKEMMRGIVRLGDNRKRKTGAL |
| | TLKPLACVLDEIDTGNLAGLRDYTLLLLMFSGALRRSEAARIEVDDLDFVGQGIRLRLKPSKHQLHETEI |
| | ALVPGKQYCPVSALARWLKQSSISEGALFRRMNRWGQLMQEPLGPQGINLMIKRRTGQAIDDLQVSGHSL |
| | RRGFITSAVTAGKPMNKIIEVTRHKDIRTLQEYFDDAHKFSDHALDGLL |
| 1427 | AHV35191.2 |
| | MQSVFDPQLNSRARRFLRSAKADSTLNAYQADTRIFVFWCQLHGLDPLQTTHHHIMNFLADQADGILADW |
| | IWLDKEEGKGELRNGEPRKPATLVRRLAGIRYAFKQKGIHPMPTEHAEIKEMMRGIVRLGDNRKRKTGAL |
| | TLKPLACVLDVIDTGNLAGLRDYTLLLLMFSGALRRSEAARIEVDDLDFVGQGIRLRLKPSKHQLHETEI |
| | ALVPGKQYCPVSALARWLKQSRISEGALFRRMNRWGQLMQEPLGPQGINLMIKRRTGQAIDDLQVSGHSL |
| | RRGFITSAVTAGKPMNKIIEVTRHKDIRTLQEYFDDAHKFSDHALDGLL |
| 1428 | EKB28734.1 |
| | MQSVFDPQLNSRARRFLRSAKADSTLNAYQADTRIFVFWCQLHGLDPLQTTHHDIMNFLADQADGILADW |
| | VWLDKEEGKGELRNGDPRKPATLVRRLAGIRYAFKQKGIHPMPTEHAEIKEMMRGIVRLGDNRKRKTGAL |
| | TLQPLACVLDEIDTGNLAGLRDYTLLLLMFSGALRRSEAARIEVDDLDFVGQGIRLRLKPSKHQLHETEI |
| | ALVPGKQYCPVSALARWLKQSRISEGALFRRMNRWGQLMQEPLGPQGINLMIKRRTGQAIDDLQVSGHSL |
| | RRGFITSAVTAGKPMNKIIEVTRHKDIRTLQEYFDDAHKFSDHALDGLL |
| 1429 | OCA67852.1 |
| | MQSVFDPQLNSRARRFLRSAKADSTLNAYQADTRIFVFWCQLHGLDPLQTTHHDIMNFLADQADGILADW |
| | VWLDKEEGKGELRNGEPRKPATLVRRLAGIRYAFKQKGIHPMPTEHAEIKEMMRGIVRLGDNRKRKTGAL |
| | TLKPLACVLDEIDTGNLAGLRDYTLLVLMFSGALRRSEAARIEVDDLNFVGQGIRLRLKPSKHQLHETEI |
| | ALVPGKQYCPVSALARWLKQSRISEGALFRRMNRWGQLMQEPLGPQGINLMIKRRTGQAIDDLQVSGHSL |
| | RRGFITSAVTAGKPMNKIIEVTRHKDIRTLQEYFDDAHKFSDHALDGLL |
| 1430 | KMK90327.1 |
| | MQSVFDPQLNSRARRFLRSAKADSTLNAYQADTRIFVFWCQLHGLDPLQTTHHDIMNFLADQADGILADW |
| | VWLDKEEGKGELRNGDPRKPATLVRRLAGIRYAFKQKGIHPMPTEHAEIKEMMRGIVRLGDNRKRKTGAL |
| | TQQPLACVLDEIDTGNLAGLRDYTLLLLMFSGALRRSEAARIEVDDLDFVGQGIRLRLKPSKHQLHETEI |
| | ALVPGKQYCPVSALARWLKQSRISEGALFRRMNRWGQLMQEPLGPQGINLMIKRRTGQAIDDLQVSGHSL |
| | RRGFITSAVTAGKPMNKIIEVTRHKDIRTLQEYFDDAHKFSDHALDGLL |
| 1431 | APJ17493.1 |
| | MQSVFDPQLNSRARRFLRSAKADSTLNAYQADTRIFVFWCQLHGLDPLQTTHHHIMNFLADQADGILADW |
| | VWLDKEEGKGELRNGEPRKPATLVRRLAGIRYAFKQKGIHPMPTEHAEIKEMMRGIVRLGDNRKRKTGAL |
| | TLKPLACVLDEIDTGNLAGLRDYTLLLLMFSGALRRSEAARIEVDDLDFVGQGIRLRLKPSKHQLHETEI |
| | ALVPGKQYCPVSALARWLKQSRISEGALFRRMNRWGQLMPEPLGPQGINLMIKRRTGQAIDDLQVSGHSL |
| | RRGFITSAVTAGKPMNKIIEVTRHKDIRTLQEYFDDAHKFSDHALDGLL |
| 1432 | WP_059167796.1 |
| | MQTVFDPQLNSRARRFLRSAKADSTLNAYQADTRIFVFWCQLHGLDPLQTTHHDIMNFLADQADGILADW |
| | VWLDKEEGKGELRNGEPRKPATLVRRLAGIRYAFKQKGIHPMPTEHAEIKEMMRGIVRLGDNRKRKTGAL |
| | TLQPLAKVLDEIDTSNLAGLRDHTLLLLMFSGALRRSEAARIEVSDLDFVGQGIRLRLKPSKHQLHETEI |
| | ALIPGKQYCPVSALHTWLKKSRIGEGALFRRMNRWGQLMSEPLGPQGINLMIKRRTGQAIDDLYVSGHSL |
| | RRGFITSAVTAGKPMNKIIEVTRHKDMRTLQEYFDDAHKFSDHALDGLL |
| 1433 | PKD25755.1 |
| | MQSVFDPQLNSRARRFLRSAKADSTLNAYQADTRIFVCWCQLHGLDPLQTTHHHIMNFLADQADGILADW |
| | VWLDKEEGRGELRNGEPRKPATLVRRLAGIRYAFKQKGIHPMPTEHAEIKEMMRGIVRLGDNRKRKTGAL |
| | TLKPLACVLDEIDTGNLAGLRDYTLLLLMFSGALRRSEAARIEVDDLDFVGQGIRLRLKPSKHQLHETEI |
| | AMVPGKQYCPVSALARWLKQSRISEGALFRRMNRWGQLMQEPLGPQGINLMIKRRTGQAIDDLQVSGHSL |
| | RRGFITSAVTAGKPMNKIIEVTRHKDIRTLQEYFDDAHKFSDHALDGLL |
| 1434 | WP_052101192.1 |
| | MQAVFDPQLNSRARRFLRSAKADSTLNAYEADTRIFVYWCQLQQLDPLQTTHHDIMNFLADQADGILADW |
| | VWLDKQEGKGELRNGEPRKPATLVRRLAGIRYAFKQKGIHPMPTEHAEIKEMMRGIVRLGDNRKRKTGAL |
| | TLQPLIRVLDDIDTSTLAGLRDHTLLLLMFSGALRRSEAARIEVSDLDFVGQGIRLRLKPSKHQLHETEI |
| | ALIPGKQYCPVSALANWLKKSRIGEGPLFRRMNRWGQLMPEPLGPQGINLMIKRRTGQVIDDLYVSGHSL |
| | RRGFITSAVTAGKPMNKIIEVTRHKDMRTLQEYFDDAHKFSDHALDGLL |
| 1435 | WP_052159026.1 |
| | MQTVFDPQLNSRARRFLRSAKADSTLNAYQADTRIFVFWCQLHGLDPLQTTHHDIMNFLADQADGILADW |
| | VWLDKEEGKGELRNGEPRKPATLVRRLAGIRYAFKQKGIHPMPTEHAEIKEMMRGIVRLGDNRKRKTGAL |
| | TLQPLARVLDEIDTSNLAGLRDHTLLLLMFSGALRRSEAARIEVSDLDFVGQGIRLRLKPSKHQLHETEI |
| | ALIPGKQYCPVSALHTWLKKSRIGEGALFRRMNRWGQLMSEPLGPQGINLMIKRRTGQAIDDLYVSGHSL |
| | RRGFITSAVTAGKPMNKIIEVTRHKDMRTLQEYFDDAHKFSDHALDGLL |
| 1436 | AGM44110.1 |
| | MQSVFDPQLNSRARRFLRSAKADSTLNAYQADTRIFVFWCQLHGLDPLQTTHHHIMNFLADQADGILADW |
| | VWLDKEEGRGELRNGEPRKPATLVRRLAGIRYAFKQKGIHPMPTEHAEIKEMMRGIVRLGDNRKRKTGAL |
| | TLKPLACVLDEIDTGNLAGLRDYTLLLLMFSGALRRSEAARIEVDDLDFVGQGIRLRLKPSKHQLHETEI |
| | ALVPGKQYCPVSALARWLKQSRISEGALFRRMNRWGQLMQEPLGPQGINLMIKRRTGQAIDDLQVSGHSL |
| | RRGFITSAVTAGKPMNKIIEITRHKDIRTLQEYFDDAHKFSDHALDGLL |
| 1437 | WP_042654758.1 |
| | MQAVFDPALNNRARRFLRSAKADSTLNAYQADTRIFVFWCQLHGLDPLQTSHHDIMNFLADQADGILADW |
| | VWLDREEGKGELRNGEPRKPATLVRRLAGIRYAFKQKGIHPMPTEHAEIKEMMRGIVRLGDNRKRKTGAL |
| | TLQPLTRVLDEIDTSNLAGLRDHTLLLLMFSGALRRSEAARIEVSDLDFVGQGIRLRLKPSKHQLHETEI |
| | ALIPGKQHCPVSALSRWLKASRLSQGPLFRRMTRWGQLTADPLGPQGINLMIKRRTGQAIDDLYVSGHSL |
| | RRGFITSAVTAGKPMNKIIEVTRHKDMRTLQEYFDDAHKFSDHALEGLL |
| 1438 | WP_042638308.1 |
| | MQAVFDPQLNSRARRFLRSAKADSTLNAYEADTRIFVYWCQLQQLDPLQTSHHDIMNFLADQADGILADW |
| | VWLDKQEGKGELRNGEPRKPATLVRRLAGIRYAFKQKGIHPMPTEHAEIKEMMRGIVRLGDNRKRKTGAL |
| | TLQPLIRVLDDIDTSNLAGLRDHTLLLLMFSGALRRSEAARIEVSDLDFVGQGIRLRLKPSKHQLHETEI |
| | ALIPGKQYCPVSALANWLKKSRIGEGPLFRRMNRWGQLMPEPLGPQGINLMIKRRTGQVIDDLYVSGHSL |
| | RRGFITSAVTAGKPMNKIIEVTRHKDMRTLQEYFDDAHKFSDHALDGLL |
| 1439 | WP_046400708.1 |
| | MQTVFDPQLNSRARRFLRSAKADSTLNAYQADTRIFVFWCQLHGLDPLQTTHHDIMNFLADQADGILADW |
| | VWLDKEEGKGELRNGEPRKPATLVRRLAGIRYAFKQKGIHPMPTEHAEIKEMMRGIVRLGDNRKRKTGAL |
| | TLQPLARVLDEIDTSNLAGLRDHTLLLLMFSGALRRSEAARIEVSDLDFVGQGIRLRLKPSKHQLHETEI |
| | ALIPGKQYCPVSALHTWLKKSRIGEGALFRRMNRWGQLMSEPLGPQGINLMIKRRTGQAIDDLYVSGHSL |
| | RRGFITSAVTAGKPMNKIIEVTRHKDMRTLQEYFDYAHKFSDHALDGLL |
| 1440 | ARW82171.1 |
| | MQTVFDPQLNSRARRFLRSAKADSTLNAYQADTRIFVFWCQLHGLDPLQTTHHDIMNFLADQADGILADW |
| | VWLDKEEGKGELRNGEPRKPATLVRRLAGIRYAFKQKGIHPMPTEHAEIKEMMRGIVRLGDNRKRKTGAL |
| | TLQPLARVLDEIDTSNLAGLRDHTLLLLMFSGALRRSEAARIEVSDLDFVGQGIRLRLKPSKHQLHETEI |
| | ALIPGKQYCPVSALHTWLKKSRIGEGALFRRMNRWGQLMSDPLGPQGINLMIKRRTGQVIDDLHVSGHSL |
| | RRGFITSAVTAGKPMNKIIEVTRHKDMRTLQEYFDDAHKFSDHALDGLL |
| 1441 | WP_042467353.1 |
| | MQTVFDPQLNSRARRFLRSAKAVSTLNAYQADTRIFVFWCQLHGLDPLQTTHHDIMNFLADQADGILADW |
| | VWLDKEEGKGELRNGEPRKPATLVRRLAGIRYAFKQKGIHPMPTEHAEIKEMMRGIVRLGDNRKRKTGAL |
| | TLQPLGRVLDEIDTSNLAGLRDHTLLLLMFSGALRRSEAARIEVSDLDFVGQGIRLRLKPSKHQLHETEI |
| | ALIPGKQYCPVSALHTWLKKSRIGEGALFRRMNRWGQLMSEPLGPQGINLMIKRRTGQAIDDLYVSGHSL |
| | RRGFITSAVTAGKPMNKIIEVTRHKDMRTLQEYFDDAHKFSDHALDGLL |
| 1442 | WP_051163765.1 |
| | MQTVFDPQLNSRARRFLRSAKAVSTLNAYQADTRIFVFWCQLHWLDPLQTTHHDIMNFLADQADGILADW |
| | VWLDKEEGKGELRNGEPRKPATLVRRLAGIRYAFKQKGIHPMPTEHAEIKEMMRGIVRLGDNRKRKTGAL |
| | TLQPLGRVLDEIDTSNLAGLRDHTLLLLMFSGALCRSEAARIEVSDLDFVGQGIRLRLKPSKHQLHETEI |
| | ALIPGKQYCPVSALHTWLKKSRIGEGALFRRMNRWGQLMSEPLGPQGINLMIKRRTGQAIDDLYVSGHSL |
| | RRGFITSAVTAGKPMNKIIEVTRHKDMRTLQEYFDDAHKFSDHALDGLL |
| 1443 | KOG94732.1 |
| | MQSVFDPQLNSRARRFLRSAKADSTLNAYQADTRIFVSWCQLHGLDPLQTTHHDIMNFLADQADGILANW |
| | VWLDKEEGKGELRNGEPRKPATLVRRLAGIRYAFKQKGIHPMPTEHAEIKEMMRGIVRLGDNRKRKTGAL |
| | TLKPLACVLDEIDTSNLAGLRDYTLLLLMFSGALRRSEAARIEVNDVQFVGQGIRLCLKPSKHQLHESEI |
| | ALIPGTRYCPVSALQQWLKKSRIAEGPLFRRMNRWGQLMTDPLGPQGINLMIKRRTGQAIDDLHVSGHSL |
| | RRGFITSAVTAGKPMNKIIEVTRHKDMRTLQEYFDDAHKFSDHALDGLL |
| 1444 | EKB19089.1 |
| | MRSAKADSTLNAYQADTRIFVFWCQLHGLDPLQTTHHDIMNFLADQADGVLADWIWLDKEEGKGELRNGE |
| | PRKPATLVRRLAGIRYAFKQKGIHPMPTEHPEIKEMMRGIVRLGDNRKHKTGALTLQPLTQVLDGIDTGD |
| | LAGLRDHTLLLLMFSGALRRSEAARIEVSDLDFVGQGIRLRLKPSKHQLHETEIALIPGKQYCPVSALQK |
| | WLHKSRISEGPLFRRMNRWGQLMAEPLGPQGINLMIKRRTGQTIDDLYVSGHSLRRGFITSAVTAGKPMN |
| | KIIEVTRHKDMRTLQEYFDDAHKFSDHALDGLL |
| 1445 | EKB18370.1 |
| | MRSAKADSTLNAYQADTRIFVFWCQLHGLDPLQTTHHDIMNFLADQADGVLADWVWLDKEEGKGELRNGE |
| | PRKPATLVRRLAGIRYAFKQKGIHPMPTEHPEIKEMMRGIVRLGDNRKRKTGALTLQPLTQVLDGIDTGD |
| | LAGLRDHTLLLLMFSGALRRSEAARIEVSDLDFMGQGIRLRLKPSKHQLHETEIALIPGKHYCPVSALQK |
| | WLHKSRISEGPLFRRMNRWGQLMAEPLGPQGINLMIKRRTGQTIDDLYVSGHSLRRGFITSAVTAGKPMN |
| | KIIEVTRHKDMRTLQEYFDDAHKFSDHALDGLL |
| 1446 | WP_082032588.1 |
| | MRSAKADSTLNAYQADTRIFVFWCQLHGLDPLQTTHHDIMNFLADQADGVLADWIWLDKEEGKGELRNGE |
| | PRKPATLVRRLAGIRYAFKQKGIHPMPTEHPEIKEMMRGIVRLGDNRKRKTGALTLQPLTQVLDGIDTHD |
| | LAGLRDHTLLLLMFSGALRRSEAARIEVSDLDFVGKGIRLRLKPSKHQLHETEIALIPGKHHCPVSALQK |
| | WLHKSRISEGALFRRMNRWGQLMAEPLGPQGINLMIKRRTGQTIDDLYVSGHSLRRGFITSAVTAGKPMN |
| | KIIEVTRHKDMRTLQEYFDDAHKFSDHALDGLL |
| 1447 | AEB50024.1 |
| | MRSAKADSTLNAYQADTRIFVFWCQLHGLDPLQTTHHDIMNFLADQADGVLANWVWLDKEEGKGELRNGE |
| | PRKPATLVRRLAGIRYAFKQKGIHPMPTEHPEIKEMMRGIVRLGDNRKRKTGALTLQPLTQVLDGIDTGD |
| | LAGLRDHTLLLLMFSGALRRSEAARIEVSDLDFVGQGIRLRLKPSKHQLHETEIALIPGKQYCPVSALQK |
| | WLHKSRISEGPLFRRMNRWGQLMAEPLGPQGINLMIKRRTGQTIDDLYVSGHSLRRGFITSAVTAGKPMN |
| | KIIEVTRHKDMRTLQEYFDDAHKFSDHALDGLL |
| 1448 | EQC05143.1 |
| | MRSAKADSTLNAYQADTRIFVFWCQLHGLDPLQTTHHDIMNFLADQADGILADWVWLDKEEGKGELRNGE |
| | PRKPATLVRRLAGIRYAFKQKGIHPMPTEHAEIKEMMRGIVRLGDNRKRKTGALTLQPLARVLDEIDTSN |
| | LAGLRDHTLLLLMFSGALRRSEAARIEVSDLDFVGQGIRLRLKPSKHQLHETEIALIPGKQYCPVSALHT |
| | WLKKSRIGEGALFRRMNRWGQLMSEPLGPQGINLMIKRRTGQAIDDLYVSGHSLRRGFITSAVTAGKPMN |
| | KIIEVTRHKDMRTLQEYFDYAHKFSDHALDGLL |
| 1449 | RAJ07841.1 |
| | MRSAKADSTLNAYQADTRIFVFWCQLHGLDPLQTTHHDIMNFLADQADGILADWVWLDKEEGKGELRNGE |
| | PRKPATLVRRLAGIRYAFKQKSIHPMPTEHAEIKEMMRGIVRLGDNRKRKTGALTLQPLARVLDEIDTSN |
| | LAGLRDHTLLLLMFSGALRRSEAARIEVSDLDFVGQGIRLRLKPSKHQLHETEIALIPGKQYCPVSALHT |
| | WLKKSRIGEGALFRRMNRWGQLMSDPLGPQGINLMIKRRTGQAIDDLYVSGHSLRRGFITSAVTAGKPMN |
| | KIIEVTRHKDMRTLQEYFDDAHKFSDHALDGLL |
| 1450 | WP_113739560.1 |
| | MAFPTLSNPAHQSLQTVFDAQLNSRARRFLRSAKADSTLNAYQADTRIFVFWCQLHRLDPLQTTHHDIMN |
| | FLADQADGVLADWVWLDKEEGKGELRNGEPRKPATLVRRLAGIRYAFKQKGIHPMPTEHPEIKEMMRGIV |
| | RLGDNRKRKTGALTLQPLTQVLDGIDTHDLAGLRDHTLLLLMFSGALRRSEAARIEVTDLDFVGQGIRLR |
| | LKPSKHQLHETEIALIPGKHYCPVSALQKWLHKSRISEGPLFRRMNRWGQLMAEPLGPQGINLMIKRRTG |
| | QTIDDLYVSGHSLRRGFITSAVTAGKPMNKIIEVTRHKDMRTLQEYFDDAHKFSDHALDGLL |
| 1451 | WP_061520510.1 |
| | MAENVNFFLKLFVEYLQIEKNYSQYTIVNYVNSIEEFEMFLHTQNINGMKEAAYHDVRIFLTEAYEKGLS |
| | RKTISKKISALRSFYKFLMREKLVEENPFQLVHLPKQEKRIPKFLYQKELEELFAVSDKSQPSGMRDQAL |
| | LELLYATGMRVSECCLLTVSDLDLFMDTVLVHGKGKKQRYIPFGSYAREALELYINSGRQCLLEKAKEPH |
| | DVLFVNQRGGPLTARGIRYILSGLVKKASGTLHIHPHMLRHTFATHLLNEGADLRSVQELLGHSNLSSTQ |
| | IYTHVSKEMLRNTYMSHHPRAFKEN |
| 1452 | WP_006951358.1 |
| | MIIKRNIIFTLESRKKDGILIIENVPIRMRVNFASKRIEFTTGYRIDAAKWDADKQRVKNGCSNKLKQSA |
| | SEINASLLGYYTKIQEIFKKFEVKEIMPTQEQIKEAFNALHKPIKEEVKPKKSTPNAFYKVFNEFVRDCG |
| | RQNDWTDSTYEKFAAVKNHLMNFHDELTFDFFDEKGLNDYVTYLRDVKEMRNSTIGKQLSFLKWFLRWAF |
| | KKGIHQNNAYDSYKPKLKSTQKKIIFLTWEELNRLREFEIPTSKQALDRVRDVFLFQCFTGLRYSDVFNL |
| | RRSDIKGDHIEVTTVKTSDSLIIELNNHSKAILDKYKDVAFEDDKVLPVITNQKMNDYLKELAELAGIDE |
| | PVRQTYYRGNERIDEVTPKYALLGTHAGRRTFICNALALGIPPQVVMKWTGHSDYKAMKPYIDIADDIKA |
| | NAMSKFNQL |
| 1453 | WP_040065515.1 |
| | MAYPSLSNPAHQSLQTVFDAQLNSRARRFLRSAKADSTLNAYQADTRIFVFWCQLHGLDPLQTTHHDIMN |
| | FLADQADGVLADWIWLDKEEGKGELRNGEPRKPATLVRRLAGIRYAFKQKGIHPMPTEHPEIKEMMRGIV |
| | RLGDNRKHKTGALTLQPLTQVLDGIDTGDLAGLRDHTLLLLMFSGALRRSEAARIEVSDLDFVGQGIRLR |
| | LKPSKHQLHETEIALIPGKHYCPVSALQKWLHKSRISEGPLFRRMNRWGQLMAEPLGPQGINLMIKRRTG |
| | QTIDDLYVSGHSLRRGFITSAVTAGKPMNKIIEVTRHKDMRTLQEYFDDAHKFSDHALDGLL |
| 1454 | WP_101531573.1 |
| | MAYPTLSNPAHQSLQTVFDAQLNSRARRFLRSAKADSTLNAYQADTRIFVFWCQLHGLDPLQTTHHDIMN |
| | FLADQADGVLADWVWLDKEEGNGELRNGEPRKPATLVRRLAGIRYAFRQKGIHPMPTEHPEIKEMMRGIV |
| | RLGDNRKRKTGALTLQPLTQVLDGIDTGDLAGLRDHTLLLLMFSGALRRSEAARIEVSDLDFVGQGLRLR |
| | LKPSKHQLHETEIALILGKHYCPVSALQKWLHKSRISEGPLFRRMNRWGQLMAEPLGPQGINLMIKRRTG |
| | QTIDDLYVSGHSLRRGFITSAVTAGKPMNKIIEVTRHKDMRTLQEYFDDAHKFSDHALDGLL |
| 1455 | WP_041235050.1 |
| | MAYPSLSNPAHQSLQTVFDAQLNSRARRFLRSAKADSTLNAYQADTRIFVFWCQLHGLDPLQTTHHDIMN |
| | FLADQADGVLADWVWLDKEEGKGELRNGEPRKPATLVRRLAGIRYAFKQKGIHPMPTEHPEIKEMMRGIV |
| | RLGDNRKRKTGALTLQPLTQVLDGIDTGDLAGLRDHTLLLLMFSGALRRSEAARIEVSDLDFVGQGIRLR |
| | LKPSKHQLHETEIALILGKHYCPVSALQKWLHKSRISEGPLFRRMNRWGQLLAEPLGPQGINLMIKRRTG |
| | QTIDDLYVSGHSLRRGFITSAVTAGKPMNKIIEVTRHKDMRTLQEYFDDAHKFSDHALDGLL |
| 1456 | WP_082038647.1 |
| | MNYPRISNPVOQPLQSVFDPQLNSRARRFLRSAKADSTLNAYQADTRIFVFWCQLHGLDPLQTTHHDIMN |
| | FLADQADGILADWVWLDKEEGKGELRNGDPRKPATLVRRLAGIRYAFKQKGIHPMPTEHAEIKEMMRGIV |
| | RLGDNRKRKTGALTLQPLACVLDEIDTGNLAGLRDYTLLLLMFSGALRRSEAARIEVDDLDFVGQGIRLR |
| | LKPSKHQLHETEIALVPGKQYCPVSALARWLKQSRISEGALFRRMNRWGQLTQEPLGPQGINLMIKRRTG |
| | QAIDDLQVSGHSLRRGFITSAVTAGKPMNKIIEVTRHKDIRTLQEYFDDAHKFSDHALDGLL |
| 1457 | WP_108588231.1 |
| | MAYPSLSNPAHQSLQTVFDAQLNSRARRFLRSAKADSTLNAYQADTRIFVFWCQLHGLDPLQTTHHDIMN |
| | FLADQADGVLADWIWLDKEEGKGELRNGEPRKPATLVRRLAGIRYAFKQKGIHPMPTEHPEIKEMMRGIV |
| | RLGDNRKHKTSALTLQPLTQVLDGIDTGDLAGLRDHTLLLLMFSGALRRSEAARIEVSDLDFMGQGIRLR |
| | LKPSKHQLHETEIALIPGKHYCPVSALQKWLHKSRISEGPLFRRMNRWGQLMAEPLGPQGINLMIKRRTG |
| | QTIDDLYVSGHSLRRGFITSAVTAGKPMNKIIEVTRHKDMRTLQEYFDDAHKFSDHALDGLL |
| 1458 | KRV94096.1 |
| | MAYPTLSNPAHQSLQTVFDAQLNSRARRFLRSAKADSTLNAYQTDTRIFVFWCQLHELEPLKTTHHDIMN |
| | FLADQADGVLADWVWLDKDEGKGELRNGEPRKPATLVRRLAGIRYAFKQKGIHPMPTEHPEIKEMMRGIV |
| | RLGDNRKRKTGALTLQPLTQVLDGIDTGDLAGLRDHTLLLLMFSGALRRSEAARIEVSDLDFVGQGIRLR |
| | LKPSKHQLHETEIALIPGKHYCPVSALQKWLHKSRISEGPLFRRMNRWGQLMAEPLGPQGINLMIKRRTG |
| | QTIDDLYVSGHSLRRGFITSAVTAGKPMNKIIEVTRHKDMRTLQEYFDDAHKFSDHALDGLL |
| 1459 | WP_099359435.1 |
| | MNYPRILNPVQQPLQSVFDPQLNSRARRFLRSAKADATLNAYQADTRIFVFWCQLHGLDPLQTTHHDIMN |
| | FLADQADGILADWIWLDKEEGKGELRNGEPRKPATLVRRLAGIRYAFKQKGIHPMPTEHAEIKEMMRGIV |
| | RLGDNRKRKTGALTLQPLACVLDEIDTGNLAGLRDYTLLLLMFSGALRRSEAARIEVDDLDFVGQGIRLR |
| | LKPSKHQLHETEIALVPGKQYCPVSALARWLKQSRISEGALFRRMNRWGQLMQEPLGPQGINLMIKRRTG |
| | QAIDDLQVSGHSLRRGFITSAVTAGKPMNKIIEVTRHKDIRTLQEYFDDAHKFSDHALDGLL |
| 1460 | WP_120414255.1 |
| | MTYPTLSNPAHQSLQTVFDAQLNSRARRFLRSAKADSTLNAYQADTRIFVFWCQLHGLDPLQTTHHDIMN |
| | FLADQADGVLADWVWLDKEEGKGELRNGEPRKPATLVRRLAGIRYAFKQKGIHPMPTEHPEIKEMMRGIV |
| | RLGDNRKRKTGALTLQPLTQVLDGIDTNDLAGLRDHTLILLMFSGALRRSEAARIEVSDLDFMGQGIRLR |
| | LKPSKHQLHETEIALIPGKHYCPVSALQKWLHKSRISEGALFRRMNRWGQLMAEPLGPQGINLMIKRRTG |
| | QTIDDLYVSGHSLRRGFITSAVTAGKPMNKIIEVTRHKDMRTLQEYFDDAHKFSDHALDGLL |
| 1461 | WP_101347286.1 |
| | MAFPTLSNPAHQSLQTVFDAQLNSRARRFLRSAKADSTLNAYQADTRIFVFWCQLHGLDPLQTTHHDIMN |
| | FLADQADGVLADWVWLDKEEGKGELRNGEPRKPATLVRRLAGIRYAFKQKGINPMPTEHPEIKEMMRGIV |
| | RLGDNRKRKTGALTLQPLTRVLDGIDTTNLAGLRDHTLLLLMFSGALRRSEAARIEVSDLDFVGQGIRLR |
| | LKPSKHQLHETEIALIPGKHHCPVSALQHWLRKSRISEGHLFRRMNRWGQLMTDPLGPQGINLMIKRRTG |
| | QAIDDLYVSGHSLRRGFITSAVTAGKPMNKIIEVTRHKDMRTLQEYFDDAHKFSDHALDGLL |
| 1462 | WP_106843696.1 |
| | MAYPSLSNPAHQSLQTVFDAQLNSRARRFLRSAKADSTLNAYQADTRIFVFWCQLHGIDPLQTTHHDIMN |
| | FLADQADGVLADWVWLDKEEGKGELRNGEPRKPATLVRRLAGIRYAFKQKGIHPMPTEHPEIKEMMRGIV |
| | RLGDNRKRKTGALTLQPLTQVLDGIDTGDLAGLRDHTLLLLMFSGALRRSEAARIEVSDLDFVGQGIRLR |
| | LKPSKHQLHETEIALIPGKHYCPVSALQNWLRKSRISEGPLFRRMNRWGQLMAEPLGPQGINLMIKRRTG |
| | QAIDDLYVSGHSLRRGFITSAVTAGKPMNKIIEVTRHKDMRTLQEYFDDAHKFSDHALDGLL |
| 1463 | WP_124242906.1 |
| | MSHPSISGSAHQSLQTVFDAQLNSRARRFLRSAKADSTLNAYQTDTRIFVFWCQLHGLDPLQTTHHDIMN |
| | FLADQADGVLANWVWLNKEEGRGELRNGEPRKPATLVRRLAGIRYAFKQKGIHPMPTEHPEIKEMMRGIV |
| | RLGDNRKRKTGALTLQPLTQVLDGIDTNDLAGLRDHTLLLLMFSGALRRSEAARIEVSDLDFVGQGIRLR |
| | LKPSKHQLHETEIALIPGKHYCPVAAIGNWLKKSRINEGPLFRRMNRWGQLTPDPLGPQGINLMIKRRTG |
| | QAIDDLYVSGHSLRRGFITSAVTAGKPMNKIIEVTRHKDMRTLQEYFDDAHKFSDHALDGLL |
| 1464 | WP_041202700.1 |
| | MAYPSLSNPAHQSLQTVFDAQLNSRARRFLRSAKADSTLNAYQADTRIFVFWCQLHGLDPLQTTHHDIMN |
| | FLADQADGVLANWVWLDKEEGKGELRNGEPRKPATLVRRLAGIRYAFKQKGIHPMPTEHPEIKEMMRGIV |
| | RLGDNRKRKTGALTLQPLTQVLDGIDTGDLAGLRDHTLLLLMFSGALRRSEAARIEVSDLDFVGQGIRLR |
| | LKPSKHQLHETEIALIPGKQYCPVSALQNWLHKSRISEGPLFRRMNRWGQLMAEPLGPQGINLMIKRRTG |
| | QTIDDLYVSGHSLRRGFITSAVTAGKPMNKIIEVTRHKDMRTLQEYFDDAHKFSDHALDGLL |
| 1465 | WP_123173050.1 |
| | MTYPTLSNPAHQSLQTVFDAQLNSRARRFLRSAKADSTLNAYQADTRIFVFWCQLHGLDPLQTTHHDIMN |
| | FLADQADGVLADWVWLDKEEGKGELRNGEPRKPATLVRRLAGIRYAFKQKGIHPMPTEHPEIKEMMRGIV |
| | RLGDNRKRKTGALTLQPLTQVLDGIDTRDLAGLRDHTLLLLMFSGALRRSEAARIEVSDLDFVGQGIRLR |
| | LKPSKHQLHETEIALIPGKHYCPVSALQNWLSKSRISEGPLFRRMNRWGQLMAEPLGPQGINLMIKRRTG |
| | QTIDDLYVSGHSLRRGFITSAVTAGKPMNKIIEVTRHKDMRTLQEYFDDAHKFSDHALNGLL |
| 1466 | WP_107682950.1 |
| | MAYPTLSNPAHQSLQTVFDAQLNSRARRFLRSAKADSTLNAYQADTRIFVFWCQLHGLDPLQTTHHDIMN |
| | FLADQADGVLADWVWLDKEEGKGELRNGEPRKPATLVRRLAGIRYAFKQKGIHPMPTEHPEIKEMMRGIV |
| | RLGDNRKRKTGALTLQPLTQVLDGIDTGDLAGLRDHTLLLLMFSGALRRSEAARIEVSDLDFVGQGIRLR |
| | LKPSKHQLHETEIALIPGKHYCPVSALQKWLHKSRISEGPLFRRMNRWGQLMAEPLGPQGINLMIKRRTG |
| | QTIDDLYVSGHSLRRGFITSAVTAGKPMNKIIEVTRHKDMRTLQEYFDDAHKFSDHALDGLL |
| 1467 | WP_128821547.1 |
| | MAYPTLSSPAHQSLQTVFDAQLNSRARRFLRSAKADSTLNAYQADTRIFVFWCQLHGLDPLQTTHHDIMN |
| | FLADQADGVLADWVWLDKEEGKGELRNGEPRKPATLVRRLAGIRYAFKQKGIHPMPTEHPEIKEMMRGIV |
| | RLGDNRKRKTGALTLQPLTQVLDGIDTHDLAGLRDHTLLLLMFSGALRRSEAARIEVSDLDFVGQGIRLR |
| | LKPSKHQLHETEIALIPGKHYCPVSALQNWLRKSRINEGPLFRRMNRWGQLMAEPLGPQGINLMIKRRTG |
| | QAIDDLYVSGHSLRRGFITSAVTAGKPMNKIIEVTRHKDMRTLQEYFDDAHKFSDHALDGLL |
| 1468 | WP_082180660.1 |
| | MNYPRLQNRVQQSLQSIFDPQLNSRARRFLRSAKADSTLNAYQADTRIFVSWCQLHGLDPLQTTHHDIMN |
| | FLADQADGVLANWVWLDKEEGKGELRNGEPRKPATLVRRLAGIRYAFKQKGIHPMPTEHAEIKEMMRGIV |
| | RLGDNRKRKTGALTLKPLACVLDEIDTCNLAGLRDYTLLLLMFSGALRRSEAARIEVNDVQFVGQGIRLR |
| | LKPSKHQLHESEIALIPGTRYCPVAALQQWLKKSRIAEGPLFRRMNRWGQLMADPLGPQGINLMIKRRTG |
| | QAIDDLHVSGHSLRRGFITSAVTAGKPMNKIIEVTRHKDMRTLQEYFDDAHKFSDHALDGLL |
| 1469 | WP_082029942.1 |
| | MAYPTISPPAHQSLQTVFDPALNSRARRFLRSAKADSTLNAYQADTRIFVFWCQLHGLDPLQTSHHDIMN |
| | FLADQADGILADWVWLDKEEGKGELRNGEPRKPATLVRRLAGIRYAFKQKGIHPMPTEHAEIKEMMRGIV |
| | RLGDNRKRKTGALTLQPLTRVLDEIDTSTLAGLRDHTLLLLMFSGALRRSEAARIEVSDLDFVGQGIRLR |
| | LKPSKHQLHETEIALIPGKHYCPVTALGRWLKASRISQGPLFRRMTRWGQLTADPLGPQGINLMIKRRTG |
| | QVIDDLYVSGHSLRRGFITSAVTAGKPMNKIIEVTRHKDMRTLQEYFDDAHKFSDHALAGLL |
| 1470 | WP_081013237.1 |
| | MNYPRISNPVOQPLQSVFDPQLNSRARRFLRSAKADSTLNAYQADTRIFVFWCQLHGLDPLQTTHHDIMN |
| | FLADQADGILADWVWLDKEEGKGELRNGDPRKPATLVRRLAGIRYAFKQKGIHPMPTEHAEIKEMMRGIV |
| | RLGDNRKRKTGALTLQPLACVLDEIDTGNLAGLRDYTLLLLMFSGALRRSEAARIEVDDLDFVGQGIRLR |
| | LKPSKHQLHETEIALVPGKQYCPVSALARWLKQSRIHEGALFRRMNRWGQLTQEPLGPQGINLMIKRRTG |
| | QAIDDLQVSGHSLRRGFITSAVTAGKPMNKIIEVTRHKDIRTLQEYFDDAHKFSDHALDGLL |
| 1471 | WP_024941785.1 |
| | MNYPRISNPVOQPLQSVFDPQLNSRARRFLRSAKADSTLNAYQADTRIFVFWCQLHGLDPLQTTHHDIMN |
| | FLADQADGILADWVWLDKEEGKGELRNGDPRKPATLVRRLAGIRYAFKQKGIHPMPTEHAEIKEMMRGIV |
| | RLGDNRKRKTGALTLKPLACVLDEIDTSNLAGLRDYTLLLLMFSGALRRSEAARIEVDDLDFVGQGIRLR |
| | LKPSKHQLHETEIALVPGKQYCPVSALARWLKQSRIHEGALFRRMNRWGQLMQEPLGPQGINLMIKRRTG |
| | QAIDDLQVSGHSLRRGFITSAVTAGKPMNKIIEVTRHKDIRTLQEYFDDAHKFSDHALDGLL |
| 1472 | WP_065017596.1 |
| | MNYPRISNPVOQPLQSVFDPQLNSRARRFLRSAKADSTLNAYQADTRIFVFWCQLHGLDPLQTTHHDIMN |
| | FLADQADGILADWVWLDKEEGKGELRNGDPRKPATLVRRLAGIRYAFKQKGIHPMPTEHAEIKEMMRGIV |
| | RLGDNRKRKTGALTLQPLACVLDEIDTGNLAGLRDYTLLLLMFSGALRRSEAARIEVDDLNFVGQGIRLR |
| | LKPSKHQLHETEIALVPGKQYCPVSALARWLKQSRIHEGALFRRMNRWGQLTQEPLGPQGINLMIKRRTG |
| | QAIDDLQVSGHSLRRGFITSAVTAGKPMNKIIEVTRHKDIRTLQEYFDDAHKFSDHALDGLL |
| 1473 | WP_042889028.1 |
| | MNYPRISNPVOQPLQSVFDPQLNSRARRFLRSAKADSTLNAYQADTRIFVFWCQLHGLDPLQTTHHDIMN |
| | FLADQADGILADWVWLDKEEGKGELRNGDPRKPATLVRRLAGIRYAFKQKGIHPMPTEHAEIKEMMRGIV |
| | RLGDNRKRKTGALTLKPLACVLDEIDTSTLAGLRDYTLLLLMFSGALRRSEAARIEVDDLDFVGQGIRLR |
| | LKPSKHQLHETEIALVPGKQYCPVSALARWLKQSRIHEGALFRRMNRWGQLMQEPLGPQGINLMIKRRTG |
| | QAIDDLQVSGHSLRRGFITSAVTAGKPMNKIIEVTRHKDIRTLQEYFDDAHKFSDHALDGLL |
| 1474 | WP_111910613.1 |
| | MAYPTISQPVOQSLQTVFDPALNSRARRFLRSAKADSTLNAYQADTRIFVFWCQLHGLDPLQTSHHDIMN |
| | FLADQADGILADWVWLDKEEGKGELRNGEPRKPATLVRRLAGIRYAFKQKGIHPMPTEHAEIKEMMRGIV |
| | RLGDNRKRKTGALTLQPLARVLDEIDTSTLAGLRDHTLLLLMFSGALRRSEAARIEVGDLDFVGQGIRLR |
| | LKPSKHQLHETEIALIPGKQYCPVTALSRWLKASRISQGPLFRRMTRWGQLTAEPLGPQGINLMIKRRTG |
| | QVIDDLYVSGHSLRRGFITSAVTAGKPMNKIIEVTRHKDMRTLQEYFDDAHKFSDHALAGLL |
| 1475 | WP_126881846.1 |
| | MNYPRISNPVOQPLQSVFDPQLNSRARRFLRSAKADSTLNAYQADTRIFVFWCQLHGLDPLQTTHHDIMN |
| | FLADQADGILADWVWLDKEEGKGELRNGDPRKPATLVRRLAGIRYAFKQKGIHPMPTEHAEIKEMMRGIV |
| | RLGDNRKRKTGALTLQPLACVLDEIDTGNLAGLRDYTLLLLMFSGALRRSEAARIEVDDLDFVGQGIRLR |
| | LKPSKHQLHETEIALVPGKQYCPVSALARWLKQSRIHEGALFRRMNRWGQLMQEPLGPQGINLMIKRRTG |
| | QAIDDLQVSGHSLRRGFITSAVTAGKPMNKIIEVTRHKDIRTLQEYFDDAHKFSDHALDGLL |
| 1476 | WP_017779021.1 |
| | MNYPRISSPVOQPLQSVFDPQLNSRARRFLRSAKADSTLNAYQADTRIFVFWCQLHGLDPLQTTHHDIMN |
| | FLADQADGILADWVWLDKEEGKGELRNGDPRKPATLVRRLAGIRYAFKQKGIHPMPTEHAEIKEMMRGIV |
| | RLGDNRKRKTGALTLKPLACVLDEIDTGNLAGLRDYTLLLLMFSGALRRSEAARIEVDDLDFVGQGIRLR |
| | LKPSKHQLHETEIALVPGKQYCPVSALARWLKQSRIHEGALFRRMNRWGQLMQEPLGPQGINLMIKRRTG |
| | QAIDDLQVSGHSLRRGFITSAVTAGKPMNKIIEVTRHKDIRTLQEYFDDAHKFSDHALDGLL |
| 1477 | WP_080768865.1 |
| | MNYPHIQAQTQQALQSVFDPQLNSRARRFLRSAKADSTLNAYQADTRIFVFWCQLHGLDPLQTTHHDIMN |
| | FLADQAEGILADWVWLDKEEGKGELRNGEPRKPATLVRRLAGIRYAFKQKGIHPMPTEHAEIKEMMRGIV |
| | RLGDNRKRKTGALTLKPLACVLDEIDTGNLVGLRDYTLLLLMFSGALRRSEAARIEVDDLDFVGQGIRLR |
| | LKPSKHQLHETEIALVPGKQYCPVSALARWLKQSRISEGALFRRMNRWGQLMQEPLGPQGINLMIKRRTG |
| | QAIDDLQVSGHSLRRGFITSAVTAGKPMNKIIEVTRHKDIRTLQEYFDNAHKFSDHALDGLL |
| 1478 | WP_080973138.1 |
| | MNYPHIQPQTQQALQSVFDPQLNSRARRFLRSAKADSTLNAYQADTRIFVFWCQLHGLDPLQTTHHDIMN |
| | FLADQADGILADWVWLDKEEGKGELRNGEPRKPATLVRRLAGIRYAFKQKGIHPMPTEHAEIKEMMRGIV |
| | RLGDNRKRKTGALTLKPLACVLDEIDTGNLAGLRDYTLLLLMFSGALRRSEAARIEVDDLDFVGQGIRLR |
| | LKPSKHQLHETEIALVPGKQYCPVSALARWLKQSRISEGALFRRMNRWGQLMQEPLGPQGINLMIKRRTG |
| | QAIDDLQVSGHSLRRGFITSAVTAGKPMNKIIEVTRHKDIRTLQEYFDDAHKFSDHALDGLF |
| 1479 | WP_024944768.1 |
| | MNYPHIQAQTQQALQSVFDPQLNSRAKRFLRSAKADSTLNAYQADTRIFVFWCQLHGLDPLQTTHHDIMN |
| | FLADQADGILADWIWLDKEEGKGELRNGEPRKPATLVRRLAGIRYAFKQKGIHPMPTEHAEIKEMMRGIV |
| | RLGDNRKRKTGALTLKPLACVLDEIDTGNLAGLRDYTLLLLMFSGALRRSEAARIEVDDLDFVGQGIRLR |
| | LKPSKHQLHETEIALVPGKQYCPVSALARWLKQSRISEGALFRRMNRWGQLMQEPLGPQGINLMIKRRTG |
| | QAIDDLQVSGHSLRRGFITSAVTAGKPMNKIIEVTRHKDIRTLQEYFDDAHKFSDHALDGLL |
| 1480 | WP_106552588.1 |
| | MNYPHIQAQAQQALQSVFDPQLNSRARRFLRSAKADSTLNAYQADTRIFVFWCQLHGLDPLQTTHHDIMN |
| | FLADQADGILADWVWLDKEEGKGELRNGEPRKPATLVRRLAGIRYAFKQKGIHPMPTEHAEIKEMMRGIV |
| | RLGDNRKRKTGALTLKPLACVLDEIDTGNLAGLRDYTLLLLMFSGALRRSEAARIEVDDLDFVGQGIRLR |
| | LKPSKHQLHETEIALVPGKQYCPVSALARWLKQSRISEGALFRRMNRWGQLMQEPLGPQGINLMIKRRTG |
| | QAIDDLQVSGHSLRRGFITSAVTAGKPMNKIIEVTRHKDIRTLQEYFDDAHKFSDHALDGLL |
| 1481 | WP_113995002.1 |
| | MNYTHIQAQTQQALQSVFDPQLNNRARRFLRSAKADSTLNAYQADTRIFVCWCQLHGLDPLQTTHHDIMN |
| | FLADQADGILADWVWLDKEEGKGELRNGEPRKPATLVRRLAGIRYAFKQKGIHPMPTEHAEIKEMMRGIV |
| | RLGDNRKRKTGALTLKPLACVLDEIDTGNLAGLRDYTLLLLMFSGALRRSEAARIEVDDLDFVGQGIRLR |
| | LKPSKHQLHETEIALVPGKQYCPVSALARWLKQSRISEGALFRRMNRWGQLMQEPLGPQGINLMIKRRTG |
| | QAIDDLQVSGHSLRRGFITSAVTAGKPMNKIIEVTRHKDIRTLQEYFDDAHKFSDHALDGLL |
| 1482 | WP_130632356.1 |
| | MNYPHIQAQTKQALQSVFDPQLNSRARRFLRSAKADSTLNAYQADTRIFVFWCQLHGLDPLQTTHHDIMN |
| | FLADQADGILADWVWLDKEEGKGELRNGEPRKPATLVRRLAGIRYAFKQKGIHPMPTEHAEIKEMMRGIV |
| | RLGDNRKRKTGALTLKPLACVLDEIDTGNLAGLRDYTLLLLMFSGALRRSEAARIEVDDLDFVGQGIRLR |
| | LKPSKHQLHETEIALVPGKQYCPVSALARWLKQSRISEGALFRRMNRWGQLMQEPLGPQGINLMIKRRTG |
| | QAIDDLQVSGHSLRRGFITSAVTAGKPMNKIIEVTRHKDIRTLQEYFDDAHKFSDHALDGLL |
| 1483 | WP_113721656.1 |
| | MAYPTVSPPVYQSLQTVFDPLLNSRARRFLRSAKADSTLNAYQADTRIFVFWCQLHGLDPLQTTHHDIMN |
| | FLADQADGILADWVWLDKEEGKGELRNGEPRKPATLVRRLAGIRYAFKQKGIHPMPTEHAEIKEMMRGIV |
| | RLGDNRKRKTGALTLQPLGRVLDEIDTSNLAGLRDHTLLLLMFSGALRRSEAARIEVSDLDFVGQGIRLR |
| | LKPSKHQLHETEIALIPGKQYCPVSALHTWLKKSRIGEGALFRRMNRWGQLMSEPLGPQGINLMIKRRTG |
| | QAIDDLYVSGHSLRRGFITSAVTAGKPMNKIIEVTRHKDMRTLQEYFDDAHKFSDHALDGLL |
| 1484 | WP_088846217.1 |
| | MAYPTVSPPVYQSLQTVFDPQLNSRARRFLRSAKAVSTLNAYQADTRIFVFWCQLHGLDPLQTTHHDIMN |
| | FLADQADGILADWVWLDKEEGKGELRNGEPRKPATLVRRLAGIRYAFKQKGIHPMPTEHAEIKEMMRGIV |
| | RLGDNRKRKTGALTLQPLGRVLDEIDTSNLAGLRDHTLLLLMFSGALRRSEAARIEVSDLDFVGQGIRLR |
| | LKPSKHQLHETEIALIPGKQYCPVSALHTWLKKSRIGEGALFRRMNRWGQLMSEPLGPQGINLMIKRRTG |
| | QAIDDLYVSGHSLRRGFITSAVTAGKPMNKIIEVTRHKDMRTLQEYFDDAHKFSDHGVLGIFPSKVT |
| 1485 | WP_076360755.1 |
| | MNYPHIQAQTQQALQSVFDPQLNSRARRFLRSAKADSTLNAYQADTRIFVFWCQLHGLDPLQTTHHDIMN |
| | FLADQADGILADWVWLDKEEGKGELRNGEPRKPATLVRRLAGIRYAFKQKGIHPMPTEHAEIKEMMRGIV |
| | RLGDNRKRKTGALTLKPLASVLDEIDTGNLAGLRDYTLLLLMFSGALRRSEAARIEVDDLDFVGQGIRLR |
| | LKPSKHQLHETEIALVPGKQYCPVSALARWLKQSRISEGALFRRMNRWGQLMPEPLGPQGINLMIKRRTG |
| | QAIDDLQVSGHSLRRGFITSAVTAGKPMNKIIEVTRHKDIRTLQEYFDDAHKFSDHALDGLL |
| 1486 | WP_131730694.1 |
| | MAYPTVSPPIYQSLQTVFDPQLNSRARRFLRSAKADSTLNAYQADTRIFVFWCQLHGLDPLQTTHHDIMN |
| | FLADQADGILADWVWLDKEEGKGELRNGEPRKPATLVRRLAGIRYAFKQKGIHPMPTEHAEIKEMMRGIV |
| | RLGDNRKRKTGALTLQPLAKVLDEIDTSNLAGLRDHTLLLLMFSGALRRSEAARIEVSDLDFVGQGIRLR |
| | LKPSKHQLHETEIALIPGKQYCPVSALHTWLKKSRIGEGALFRRMNRWGQLMSEPLGPQGINLMIKRRTG |
| | QAIDDLYVSGHSLRRGFITSAVTAGKPMNKIIEVTRHKDMRTLQEYFDDAHKFSDHALDGLL |
| 1487 | WP_103243980.1 |
| | MATTPAVTDMPDTGSAPAIRTAVTPQDDHNHAARHRVFLAAATSDNTRQAYRSAVKHYLDWGGVLPANEP |
| | AVIRYLVRYADTLNPRTLALRLTALSQWHVHQGFADPAATPTVRKTLAGIARTNGRPKKKAKALPIEDLE |
| | LIVANLASLGTLKAARDNALLQVGFFGGFRRSELVGIKVDHITWEAQGITLTLPRSKTDQTGEGVAKAIP |
| | YSAGPCCPATALRTWLDAAGVASGPVFRSISKWGVVGADRLNPASVNTILAGAAQLAKLGYVPELSSHSL |
| | RRGMATSAHRAGAEFRDIKKQGGWRHDGTVQGYIEEAGLFEENAAGSLLRSRTRTSG |
| 1488 | WP_081304608.1 |
| | MNYQQ1QAQTHQALQSVFDPQLNSRARRFLRSAKADSTLNAYQADTRIFVFWCQLHGLDPLQTTHHHIMN |
| | FLADQADGILADWVWLDKEEGKGELRNGEPRKPATLVRRLAGIRYAFKQKGIHPMPTEHAEIKEMMRGIV |
| | RLGDNRKRKTGALTLKPLACVLDEIDTGNLAGLRDYTLLLLMFSGALRRSEAARIEVDDLDFVGQGIRLR |
| | LKPSKHQLHETEIALVPGKQYCPVSALARWLKQSRISEGALFRRMNRWGQLMQEPLGPQGINLMIKRRTG |
| | QAIDDLQVSGHSLRRGFITSAVTAGKPMNKIIEVTRHKDIRTLQEYFDDAHKFSDHALDGLL |
| 1489 | WP_118881229.1 |
| | MNYPHIQAQTQQALQSVFDPQLNSRARRFLRSAKADSTLNAYQADTRIFVFWCQLHGLDPLQTTHHDIMN |
| | FLADQADGILADWVWLDKEERKGELRNGEPRKPATLVRRLAGIRYAFKQKGIHPMPTEHAEIKEMMRGIV |
| | RLGDNRKRKTGALTLKPLACVLDEIDTGNLAGLRDYTLLLLMFSGALRRSEAARIEVDDLDFVGQGIRLR |
| | LKPSKHQLHETEIALVPGKQYCPVSALARWLKQSRISEGALFRRMNRWGQLMQEPLGPQGINLMIKRRTG |
| | QAIDDLQVSGHSLRRGFITSAVTAGKPMNKIIEVTRHKDIRTLQEYFDDAHKFSDHALDGLL |
| 1490 | WP_029300882.1 |
| | MNYPHIQAQTQQALQSVFDPQLNSRARRFLRSAKADSTLNAYQADTRIFVFWCQLHGLDPLQTTHHDIMN |
| | FLADQADGILADWVWLDKEEGKGELRNGEPRKPATLVRRLAGIRYAFKQKGIHPMPTEHAEIKEMMRGIV |
| | RLGDNRKRKTGALTLKPLAYVLDEIDTGNLAGLRDYTLLLLMFSGALRRSEAARIEVGDLDFVGQGIRLR |
| | LKPSKHQLHETEIALVPGKQYCPVSALARWLKQSRISEGALFRRMNRWGQLMQEPLGPQGINLMIKRRTG |
| | QAIDDLQVSGHSLRRGFITSAVTAGKPMNKIIEVTRHKDIRTLQEYFDDAHKFSDHALDGLL |
| 1491 | WP_102988785.1 |
| | MNYPHIQAQTQQALQSVFDPQLNSRARRFLRSAKADSTLSAYQADTRIFVFWCQLHGLDPLQTTHHDIMN |
| | FLADQADGILADWVWLDKEEGKGELRNGEPRKPATLVRRLAGIRYAFKQKGIHPMPTEHAEIKEMMRGIV |
| | RLGDNRKRKTGALTLKPLACVLDEIDTGNLAGLRDYTLLLLMFSGALRRSEAARIEVDDLDFVGQGIRLR |
| | LKPSKHQLHETEIALVPGKQYCPVSALARWLKQSRISEGALFRRMNRWGQLMQEPLGPQGINLMIKRRTG |
| | QAIDDLQVSGHSLRRGFITSAVTAGKPMNKIIEVTRHKDIRTLQEYFDDAHKFSDHALDGLL |
| 1492 | WP_034523632.1 |
| | MAYPTVSPPVYQSLQTVFDPQLNSRARRFLRSAKADSTLNAYQADTRIFVFWCQLHGLDPLQTTHHDIMN |
| | FLADQADGILADWVWLDKEEGKGELRNGEPRKPATLVRRLAGIRYAFKQKGIHPMPTEHAEIKEMMRGIV |
| | RLGDNRKRKTGALTLQPLARVLDEIDTSNLAGLRDHTLLLLMFSGALRRSEAARIEVSDLDFVGQGIRLR |
| | LKPSKHQLHETEIALIPGKQYCPVSALHTWLKKSRIGEGALFRRMNRWGQLMSEPLGPQGINLMIKRRTG |
| | QAIDDLYVSGHSLRRGFITSAVTAGKPMNKIIEVTRHKDMRTLQEYFDYAHKFSDHALDGLL |
| 1493 | WP_011706113.1 |
| | MNYPDIQAQTQQALQSVFDPQLNSRARRFLRSAKADSTLNAYQADTRIFVFWCQLHGLDPLQTTHHHIMN |
| | FLADQADGILADWVWLDKEEGRGELRNGEPRKPATLVRRLAGIRYAFKQKGIHPMPTEHAEIKEMMRGIV |
| | RLGDNRKRKTGALTLKPLACVLDEIDTGNLAGLRDYTLLLLMFSGALRRSEAARIEVDDLDFVGQGIRLR |
| | LKPSKHQLHETEIALVPGKQYCPVSALARWLKQSRISEGALFRRMNRWGQLMQEPLGPQGINLMIKRRTG |
| | QAIDDLQVSGHSLRRGFITSAVTAGKPMNKIIEVTRHKDIRTLQEYFDDAHKFSDHALDGLL |
| 1494 | WP_081086191.1 |
| | MNYPHIQAQTQQALQSVFDPQLNSRARRFLRSAKADSTLNAYQADTRIFVFWCQLHGLDPLQTTHHHIMN |
| | FLADQADGILADWVWLDKEEGRGELRNGEPRKPATLVRRLAGIRYAFKQKGIHPMPTEHAEIKEMMRGIV |
| | RLGDNRKRKTGALTLKPLACVLDEIDTGNLAGLRDYTLLLLMFSGALRRSEAARIEVDDLDFVGQGIRLR |
| | LKPSKHQLHETEIAMVPGKQYCPVSALARWLKQSRISEGALFRRMNRWGQLMQEPLGPQGINLMIKRRTG |
| | QAIDDLQVSGHSLRRGFITSAVTAGKPMNKIIEVTRHKDIRTLQEYFDDAHKFSDHALDGLL |
| 1495 | WP_045789855.1 |
| | MNYPHIQAQTQQALQSVFDPQLNSRARRFLRSAKADSTLNAYQADTRIFVFWCQLHGLDPLLTTHHHIMN |
| | FLADQADGILADWIWLDKEEGKGELRNGEPRKPATLVRRLAGIRYAFKQKGIHPMPTEHAEIKEMMRGIV |
| | RLGDNRKRKTGALTLKPLACVLDEIDTGNLAGLRDYTLLLLMFSGALRRSEAARIEVDDLDFVGQGIRLR |
| | LKPSKHQLHETEIALVPGKQYCPVSALARWLKQSRISEGALFRRMNRWGQLMPEPLGPQGINLMIKRRTG |
| | QAIDDLQVSGHSLRRGFITSAVTAGKPMNKIIEVTRHKDIRTLQEYFDDAHKFSDHALDGLL |
| 1496 | WP_101617448.1 |
| | MNYPHIQAQTQQALQSVFDPQLNSRARRFLRSAKADSTLNAYQADTRIFVFWCQLHGLDPLQTTHHDIMN |
| | FLADQADGILADWVWLDKEEGKGELRNGEPRKPATLVRRLAGIRYAFKQKGIHPMPTEHAEIKEMMRGIV |
| | RLGDNRKRKTGALTLKPLACVLDEIDIGNLAGLRDYTLLLLMFSGALRRSEAARIEVDDLDFVGQGIRLR |
| | LKPSKHQLHETEIALVPGKQYCPVSALALWLKQSRISEGALFRRMNRWGQLMQEPLGPQGINLMIKRRTG |
| | QAIDDLQVSGHSLRRGFITSAVTAGKPMNKIIEITRHKDIRTLQEYFDDAHKFSDHALDGLL |
| 1497 | WP_099993215.1 |
| | MAYPTVSPPVYQSLQTVFDPQLNSRARRFLRSAKADSTLNAYQADTRIFVFWCQLHMLDPLQTTHHDIMN |
| | FLADQADGILADWVWLDKEAGKGELRNGEPRKPATLVRRLAGIRYAFKQKGIHPMPTEHAEIKEMMRGIV |
| | RLGDNRKRKTGALTLQPLARVLDEIDTSNLAGLRDHTLLLLMFSGALRRSEAARIEVSDLDFVGQGIRLR |
| | LKPSKHQLHETEIALIPGKQYCPVSALHTWLKKSRIGEGALFRRMNRWGQLMPDPLGPQGINLMIKRRTG |
| | QAIDDLYVSGHSLRRGFITSAVTAGKPMNKIIEVTRHKDMRTLQEYFDDAHKFSDHALDGLL |
| 1498 | WP_104455933.1 |
| | MNYPRLQNPVOQSLOSVFDPQLNSRARRFLRSAKADSTLNAYQADTRIFVSWCQLHGLDPLQTTHHDIMN |
| | FLADQADGILANWVWLDKEEGKGELRNGKPRKPATLVRRLAGIRYAFKQKGIHPMPTEHAEIKEMMRGIV |
| | RLGDNRKRKTGALTLKPLACVLDEIDTSNLAGLRDYTLLLLMFSGALRRSEAARIEVDDVQFVGQGIRLR |
| | LKPSKHQLHESEIALIPGTRYCPVSALQQWLKKSRIAEGPLFRRMNRWGQLMTDPLGPQGINLMIKRRTD |
| | QAIDDLHVSGHSLRRGFITSAVTAGKPMNKIIEVTRHKDMRTLQEYFDDAHKFSDHALDGLL |
| 1499 | WP_042863872.1 |
| | MNYPSLQNPVOQSLOSVFDPQLNSRARRFLRSAKADSTLNAYQADTRIFVSWCQLHGLDPLQTTHHDIMN |
| | FLADQADGILANWVWLDKEEGKGELRNGEPRKPATLVRRLAGIRYAFKQKGIHPMPTEHAEIKEMMRGIV |
| | RLGDNRKRKTGALTLKPLACVLDEIDTSNLAGLRDYTLLLLMFSGALRRSEAARIEVNDVQFVGQGIRLR |
| | LKPSKHQLHESEIALIPGTRYCPVSALQQWLKKSRIAEGPLFRRMNRWGQLMTDPLGPQGINLMIKRRTG |
| | QAIDDLHVSGHSLRRGFITSAVTAGKPMNKIIEVTRHKDMRTLQEYFDDAHKFSDHALDGLL |
| 1500 | WP_041205782.1 |
| | MNYPSLQNPVOQSLOSVFDPQLNSRARRFLRSAKADSTLNAYQADTRIFVSWCQLHGLEPLQTTHHDIMN |
| | FLADQADGILANWVWLDKEEGKGELRNGEPRKPATLVRRLAGIRYAFKQKGIHPMPTEHAEIKEMMRGIV |
| | RLGDNRKRKTGALTLKPLACVLDEIDTSNLAGLRDYTLLLLMFSGALRRSEAARIEVDDVQFVGQGIRLR |
| | LKPSKHQLHESEIALIPGTRYCPVSALQQWLKRSRIAEGPLFRRMNRWGQLMADPLGPQGINLMIKRRTG |
| | QGIDDLHVSGHSLRRGFITSAVTAGKPMNKIIEVTRHKDMRTLQEYFDDAHKFSDHALDGLL |
| 1501 | WP_043152710.1 |
| | MNYPRLQNPVOQSLOSVFDPQLNSRARRFLRSAKADSTLNAYQADTRIFVSWCQLHGLEPLQTTHHDIMN |
| | FLADQADGILANWVWLDKEEGKGELRNGEPRKPATLVRRLAGIRYAFKQKGIHPMPTEHAEIKEMMRGIV |
| | RLGDNRKRKTGALTLKPLACVLDAIDTSNLAGLRDYTLLLLMFSGALRRSEAARIEVNDVQFVGQGIRLR |
| | LKPSKHQLHESEIALIPGIRYCPVSALQQWLKKSRIAEGPLFRRMNRWGQLMADPLGPQGINLMIKRRTG |
| | QAIDDLHVSGHSLRRGFITSAVTAGKPMNKIIEVTRHKDMRTLQEYFDDAHKFSDHALDGLL |
| 1502 | WP_103858936.1 |
| | MNYPRLQNPVOQSLOSVFDPQLNSRARRFLRSAKADSTLNAYQADTRIFVSWCQLHGLDPLQTTHHDIMN |
| | FLADQADGVLANWVWLDKEEGKGELRNGEPRKPATLVRRLAGIRYAFKQKGIHPMPTEHAEIKEMMRGIV |
| | RLGDNRKRKTGALTLKPLACVLDEIDTSNLAGLRDYTLLLLMFSGALRRSEAARIEVDDVQFVGQGIRLR |
| | LKPSKHQLHESEIALIPGIRYCPVSALQQWLKKSRIAEGPLFRRMNRWGQLMADPLGPQGINLMIKRRTG |
| | QAIDDLHVSGHSLRRGFITSAVTAGKPMNKIIEVTRHKDMRTLQEYFDDAHKFSDHALDGLL |
| 1503 | WP_124239332.1 |
| | MAYPTFSNPAHQSLQTIFDAQLNSRARRFLRSAKADSTLNAYQADTRIFVFWCQLHGLDPLQITHHDIMN |
| | FLADQADGVLADWVWLDKEEGKGELRNGEPRKPATLVRRLAGIRYAFQQKGIHPMPTEHPEIKEMMRGIV |
| | RLGDNRKRKTGALTLQPLARVLSGIDTSTLAGLRDYTLLLLMFSGALRRSEAARIEVSDLDFVGQGIRLR |
| | LKPSKHQLHETEIALVPGKQYCPVQGLQHWLEKSRIKEGALFRRMNRWGQLTEEPLGPQGINQMIKRRTG |
| | QAIDDLYVSGHSLRRGFITSAVTAGKPMNKIIEVTRHKDMRTLQEYFDDANKFSDHALDGLL |
| 1504 | WP_103261885.1 |
| | MNYPSLQNPVOQSLOSVFDPQLNSRARRFLRSAKADSTLNAYQADTRIFVSWCQLHGLDPLQTTHHDIMN |
| | FLADQADGILANWVWLDKEEGKGELRNGEPRKPATLVRRLAGIRYAFKQKGIHPMPTEHAEIKEMMRGIV |
| | RLGDNRKRKTGALTLKPLACVLDEIDTCNLAGLRDYTLLLLMFSGALRRSEAARIEVNDVQFVGQGIRLR |
| | LKPSKHQLHESEIALIPGTRYCPVSALQQWLKKSRIAEGPLFRRMNRWGQLMADPLGPQGINLMIKRRTG |
| | QAIDDLHVSGHSLRRGFITSAVTAGKPMNKIIEVTRHKDMRTLQEYFDDAHKFSDHALDGLL |
| 1505 | WP_103260130.1 |
| | MNYPRLQNPVOQSLOSVFDPQLNSRARRFLRSAKADSTLNAYQADTRIFVSWCQLHGLDPLQTTHHDIMN |
| | FLADQADGVLANWVWLDKEEGKGELRNGEPRKPATLVRRLAGIRYAFKQKGIHPMPTEHAEIKEMMRGIV |
| | RLGDNRKRKTGALTLKPLACVLDEIDTSNLAGLRDYTLLLLMFSGALRRSEAARIEVDDVQFVGQGIRLR |
| | LKPSKHQLHESEIALIPGTRYCPVSALQQWLKKSRIAEGPLFRRMNRWGQLMADPLGPQGINLMIKRRTG |
| | QAIDDLHVSGHSLRRGFITSAVTAGKPMNKIIEVTRHKDMRTLQEYFDDAHKFSDHALDGLL |
| 1506 | WP_111809297.1 |
| | MAYPTVSPPVYQSLQTVFDPQLNSRARRFLRSAKADSTLNAYQADTRIFVFWCQLHGLDPLQTTHHDIMN |
| | FLADQADGVLADWVWLDKEEGKGELRNGEPRKPATLVRRLAGIRYAFKQKGIHPMPTEHPEIKEMMRGIV |
| | RLGDNRKRKTGALTLQPLIQVLNGIDTHDLAGLRDHTLLLLMFSGALRRSEAARIEVSDLDFVGQGIRLR |
| | LKPSKHQLHETEIALIPGKHYCPVSALQNWLHKSRISEGPLFRRMNRWGQLMAEPLGPQGINLMIKRRTG |
| | QAIDDLYVSGHSLRRGFITSAVTAGKPMNKIIEVTRHKDMRTLQEYFDDAHKFSDHALDGLL |
| 1507 | WP_081331871.1 |
| | MNYPRLQNPVOQSLOSVFDPQLNSRARRFLRSAKADSTLNAYQADTRIFVSWCQLHGLEPLQTTHHDIMN |
| | FLADQADGILANWVWLDKEEGKGELRNGEPRKPATLVRRLAGIRYAFKQKGIHPMPTEHAEIKEMMRGIV |
| | RLGDNRKRKTGALTLKPLACVLDEIDTSNLAGLRDYTLLLLMFSGALRRSEAARIEVDDVQFVGQGIRLR |
| | LKPSKHQLHESEIALIPGTRYCPVSALQQWLKRSRIAEGPLFRRMNRWGQLMADPLGPQGINLMIKRRTG |
| | QAIDDLHVSGHSLRRGFITSAVTAGKPMNKIIEVTRHKDMRTLQEYFDDAHKFSDHALDGLL |
| 1508 | WP_041215162.1 |
| | MNYPRLQNPVOQSLOSVFDPQLNSRARRFLRSAKADSTLNAYQADTRIFVSWCQLHGLDPLQTTHHDIMN |
| | FLADQADGILANWVWLDKEEGKGELRNGEPRKPATLVRRLAGIRYAFKQKGIHPMPTEHAEIKEMMRGIV |
| | RLGDNRKRKTGALTLKPLACVLDEIDTSNLAGLRDYTLLLLMFSGALRRSEAARIEVNDVQFVGQGIRLR |
| | LKPSKHQLHESEIALIPGTRYCPVSALQQWLKKSRIAEGPLFRRMNRWGQLMADPLGPQGINLMIKRRTG |
| | QAIDDLHVSGHSLRRGFITSAVTAGKPMNKIIEVTRHKDMRTLQEYFDDAHKFSDHALDGLL |
| 1509 | WP_126623323.1 |
| | MAYPTVSPPVHQSLQAVFDPALNNRARRFLRSAKADSTLNAYQADTRIFVFWCQLHGLDPLQTSHHDIMN |
| | FLADQADGILADWVWLDREEGKGELRNGEPRKPATLVRRLAGIRYAFKQKGIHPMPTEHAEIKEMMRGIV |
| | RLGDNRKRKTGALTLQPLTRVLDEIDTSNLAGLRDHTLLLLMFSGALRRSEAARIEVSDLDFVGQGIRLR |
| | LKPSKHQLHETEIALIPGKQHCPVSALSRWLKASRLSQGPLFRRMTRWGQLTADPLGPQGINLMIKRRTG |
| | QAIDDLYVSGHSLRRGFITSAVTAGKPMNKIIEVTRHKDMRTLQEYFDDAHKFSDHALEGLL |
| 1510 | WP_050490004.1 |
| | MQTVFDAQLNSRARRFLRSAKADSTLNAYQADTRIFVFWCQLHGLDPLQTTHHDIMNFLADQADGVLADW |
| | VWLNKEEGRGELRNGEPRKPATLVRRLAGIRYAFKQKGIHPMPTEHPEIKEMMRGIVRLGDNRKRKTGAL |
| | TLQPLTQVLDGIDTNDLAGLRDHTLLLLMFSGALRRSEAARIEMSDLDFVGQGIRLRLKPSKHQLHETEI |
| | ALIPGKHYCPVAAIGNWLKKSRINEGPLFRRMNRWGQLTPDPLGPQGINLMIKRRTGQAIDGLYVSGHSL |
| | RRGFITSAVTAGKPMNKIIEVTRHKDMRTLQEYFDDAHKFSDHALDGLL |
| 1511 | WP_042030957.1 |
| | MQTVFDAQLNSRARRFLRSAKADSTLNAYQADTRIFVFWCQLHGLDPLQTTHHDIMNFLADQADGVLADW |
| | VWLNKEEGRGELRNGEPRKPATLVRRLAGIRYAFKQKGIHPMPTEHPEIKEMMRGIVRLGDNRKRKTGAL |
| | TLQPLTQVLDGIDTNNLAGLRDHTLLLLMFSGALRRSEAARIEVSDLDFVGQGIRLRLKPSKHQLHETEI |
| | ALIPGKHYCPVAAIGNWLKKSRINEGPLFRRMNRWGQLTPDPLGPQGINLMIKRRTGQAIDDLYVSGHSL |
| | RRGFITSAVTAGKPMNKIIEVTRHKDMRTLQEYFDDAHKFSDHALDGLL |
| 1512 | WP_042083230.1 |
| | MQTVFDTQLNSRARRFLRSAKADSTLNAYQADTRIFVCWCQLHGLDPLQTTHHDIMNFLADQADGVLADW |
| | VWLDKEEGKGELRNGEPRKPATLVRRLAGIRYAFKQKGIHPMPTEHPEIKEMMRGIVRLGDNRKRKTGAL |
| | TLQPLTQVLDGIDTGDLAGLRDHTLLLLMFSGALRRSEAARIEVSDLDFVGQGIRLRLKPSKHQLHETEI |
| | ALIPGKHYCPVSALQKWLHKSRISEGPLFRRMNRWGQLMAEPLGPQGINLMIKRRTGQTIDDLYVSGHSL |
| | RRGFITSAVTAGKPMNKIIEVTRHKDMRTLQEYFDDAHKFSDHALDGLL |
| 1513 | WP_064340028.1 |
| | MQTVFDAQLNSRARRFLRSAKADSTLNAYQADTRIFVFWCQLHGLDPLQTTHHDIMNFLADQADGVLADW |
| | VWLDKEEGKGELRNGEPRKPATLVRRLAGIRYAFKQKGIHPMPTEHPEIKEMMRGIVRLGDNRKRKTGAL |
| | TLQPLTQVLDGIDIGDLAGLRDHTLLLLMFSGALRRSEAARIEVSDLDFVGQGIRLRLKPSKHQLHETEI |
| | ALIPGKHYCPVSALQNWLRKSRISEGPLFRRMNRWGQLMTEPLGPQGINLMIKRRTGQAIDDLYVSGHSL |
| | RRGFITSAVTAGKPMNKIIEVTRHKDMRTLQEYFDDAHKFSDHALDGLL |
| 1514 | WP_041980781.1 |
| | MQTVFDAQLNSRARRFLRSAKADSTLNAYQADTRIFVFWCQLHGLDPLQTTHHDIMNFLADQADGVLANW |
| | VWLDKEEGKGELRNGEPRKPATLVRRLAGIRYAFKQKGIHPMPTEHPEIKEMMRGIVRLGDNRKRKTGAL |
| | TLQPLTQVLDGIDTGDLAGLRDHTLLLLMFSGALRRSEAARIEVSDLDFVGQGIRLRLKPSKHQLHETEI |
| | ALIPGKQYCPVSALQKWLHKSRISEGPLFRRMNRWGQLMAEPLGPQGINLMIKRRTGQTIDDLYVSGHSL |
| | RRGFITSAVTAGKPMNKIIEVTRHKDMRTLQEYFDDAHKFSDHALDGLL |
| 1515 | WP_042655814.1 |
| | MQTVFDAQLNSRARRFLRSAKADSTLNAYQADTRIFVFWCQLHGLDPLQTTHHDIMNFLADQADGVLADW |
| | VWLDKEEGKGELRNGEPRKPATLVRRLAGIRYAFKQKGIHPMPTEHPEIKEMMRGIVRLGDNRKRKTGAL |
| | TLQPLTQVLDGIDTHDLAGLRDHTLLLLMFSGALRRSEAARIEVSDLDFVGQGIRLRLKPSKHQLHETEI |
| | ALIPGKHYCPVSALQNWLRKSRINEGPLFRRMNRWGQLMAEPLGPQGINLMIKRRTGQAIDDLYVSGHSL |
| | RRGFITSAVTAGKPMNKIIEVTRHKDMRTLQEYFDDAHKFSDHALDGLL |
| 1516 | WP_052447116.1 |
| | MQTVFDAQLNSRARRFLRSAKADSTLNAYQADTRIFVFWCQLHGLDPLQTTHHDIMNFLADQADGVLADW |
| | IWLDKEEGKGELRNGEPRKPATLVRRLAGIRYAFKQKGIHPMPTEHPEIKEMMRGIVRLGDNRKHKTGAL |
| | TLQPLTQVLDGIDTGDLAGLRDHTLLLLMFSGALRRSEAARIEVSDLDFVGQGIRLRLKPSKHQLHETEI |
| | ALIPGKHYCPVSALQKWLHKSRISEGPLFRRMNRWGQLMAEPLGPQGINLMIKRRTGQTIDDLYVSGHSL |
| | RRGFITSAVTAGKPMNKIIEVTRHKDMRTLQEYFDDAHKFSDHALDGLL |
| 1517 | PHS84353.1 |
| | MQSVFDPQLNSRARRFLRSAKADATLNAYQADTRIFVFWCQLHGLDPLQTTHHDIMNFLADQADGILADW |
| | IWLDKEEGKGELRNGEPRKPATLVRRLAGIRYAFKQKGIHPMPTEHAEIKEMMRGIVRLGDNRKRKTGAL |
| | TLQPLACVLDEIDTGNLAGLRDYTLLLLMFSGALRRSEAARIEVDDLDFVGQGIRLRLKPSKHQLHETEI |
| | ALVPGKQYCPVSALARWLKQSRISEGALFRRMNRWGQLMQEPLGPQGINLMIKRRTGQAIDDLQVSGHSL |
| | RRGFITSAVTAGKPMNKIIEVTRHKDIRTLQEYFDDAHKFSDHALDGLL |
| 1518 | WP_042037844.1 |
| | MQTVFDAQLNSRARRFLRGAKADSTLNAYQADTRIFVFWCLLHGLDPLQTTHHDIMNFLADQADGVLADW |
| | VWLDKEEGKGELRNGEPRKPATLVRRLAGIRYAFKQKGIHPMPTEHAEIKEMMRGIVRLGDNRKRKTGAL |
| | TLQPLTQVLDGIDTTALAGLRDHTLLLLMFSGALRRSEAARIEVSDLDFVGQGIRLRLKPSKHQLHETEI |
| | ALIPGKHYCPVSALQNWLRKSRISDGPLFRRMNRWGQLMTEPLGPQGINLMIKRRTGQTIDDLYVSGHSL |
| | RRGFITSAVTAGKPMNKIIEVTRHKDMRTLQEYFDDAHKFSDHALDGLL |
| 1519 | OEG05223.1 |
| | MQSVFDPQLNSRARRFLRSAKADSTLNAYQADTRIFVSWCQLHGLEPLQTTHHDIMNFLADQADGILANW |
| | VWLDKEEGKGELRNGEPRKPATLVRRLAGIRYAFKQKGIHPMPTEHAEIKEMMRGIVRLGDNRKRKTGAL |
| | TLKPLACVLDEIDTSNLAGLRDYTLLLLMFSGALRRSEAARIEVDDVQFVGQGIRLRLKPSKHQLHESEI |
| | ALIPGTRYCPVSALQQWLKRSRIAEGPLFRRMNRWGQLMADPLGPQGINLMIKRRTGQAIDDLHVSGHSL |
| | RRGFITSAVTAGKPMNKIIEVTRHKDMRTLQEYFDDAHKFSDHALDGLL |
| 1520 | KLV47629.1 |
| | MQSIFDPQLNSRARRFLRSAKADSTLNAYQADTRIFVSWCQLHGLDPLQTTHHDIMNFLADQADGVLANW |
| | VWLDKEEGKGELRNGEPRKPATLVRRLAGIRYAFKQKGIHPMPTEHAEIKEMMRGIVRLGDNRKRKTGAL |
| | TLKPLACVLDEIDTCNLAGLRDYTLLLLMFSGALRRSEAARIEVNDVQFVGQGIRLRLKPSKHQLHESEI |
| | ALIPGTRYCPVAALQQWLKKSRIAEGPLFRRMNRWGQLMADPLGPQGINLMIKRRTGQAIDDLHVSGHSL |
| | RRGFITSAVTAGKPMNKIIEVTRHKDMRTLQEYFDDAHKFSDHALDGLL |
| 1521 | AXV34415.1 |
| | MQSVFDPQLNSRARRFLRSAKADSTLNAYQADTRIFVFWCQLHGLDPLQTTHHDIMNFLADQADGILADW |
| | VWLDKEERKGELRNGEPRKPATLVRRLAGIRYAFKQKGIHPMPTEHAEIKEMMRGIVRLGDNRKRKTGAL |
| | TLKPLACVLDEIDTGNLAGLRDYTLLLLMFSGALRRSEAARIEVDDLDFVGQGIRLRLKPSKHQLHETEI |
| | ALVPGKQYCPVSALARWLKQSRISEGALFRRMNRWGQLMQEPLGPQGINLMIKRRTGQAIDDLQVSGHSL |
| | RRGFITSAVTAGKPMNKIIEVTRHKDIRTLQEYFDDAHKFSDHALDGLL |
| 1522 | OCA59831.1 |
| | MQTVFDPQLNSRARRFLRSAKADSTLNAYQADTRIFVFWCQLHGLDPLQTTHHDIMNFLADQADGILADW |
| | VWLDKEEGKGELRNGEPRKPATLVRRLAGIRYAFKQKGIHPMPTEHAEIKEMMRGIVRLGDNRKRKTGAL |
| | TLQPLGRVLDEIDTSNLAGLRDHTLLLLMFSGALRRSEAARIEVSDLDFVGQGIRLRLKPSKHQLHETEI |
| | ALIPGKQYCPISALHTWLKKSRIGEGALFRRMNRWGQLMSEPLGPQGINLMIKRRTGQAIDDLYVSGHSL |
| | RRGFITSAVTAGKPMNKIIEVTRHKDMRTLQEYFDDAHKFSDHALDGLL |
| 1523 | SUU28072.1 |
| | MQSVFDPQLNSRARRFLRSAKADSTLNAYQADTRIFVFWCQLHGLDPLQTTHHHIMNFLADQADGILADW |
| | VWLDKEEGRGELRNGEPRKPATLVRRLAGIRYAFKQKGIHPMPTEHAEIKEMMRGIVRLGDNRKRKTGAL |
| | TLKPLACVLDEIDTGNLAGLRDYTLLLLMFSGALRRSEAARIEVDDLDFVGQGIRLRLKPSKHQLHETEI |
| | ALVPGKQYCPVSALARWLKQSRISEGALFRRMNRWGQLMQEPLGPQGINLMIKRRTGQAIDDLQVSGHSL |
| | RRGFITSAVTAGKPMNKIIEVTRHKDIRTLQEYFDDAHKFSDHALDGLL |
| 1524 | KWR69035.1 |
| | MQSVFDPQLNSRARRFLRSAKADSTLNAYQADTRIFVFWCQLHGLDPLQTTHHHIMNFLADQADGILADW |
| | VWLDKEEGRGELRNGEPRKPATLVRRLAGIRYAFKQKGIHPMPTEHAEIKEMMRGIVRLGDNRKRKTGAL |
| | TLKPLACVLDEIDTGNLAGLRDYTLLLLMFSGALRRSEAARIEVDDLDFVGQGIRLRLKPSKHQLHETEI |
| | AMVPGKQYCPVSALARWLKQSRISEGALFRRMNRWGQLMQEPLGPQGINLMIKRRTGQAIDDLQVSGHSL |
| | RRGFITSAVTAGKPMNKIIEVTRHKDIRTLQEYFDDAHKFSDHALDGLL |
| 1525 | WP_052449173.1 |
| | MQTVFDPQLNSRARRFLRSAKADSTLNAYQADTRIFVFWCQLHGLDPLQTTHHDIMNFLADQADGILADW |
| | VWLDKEEGKGELRNGEPRKPATLVRRLAGIRYAFKQKGIHPMPTEHAEIKEMMRGIVRLGDNRKRKTGAL |
| | TLQPLARVLDEIDTSSLAGLRDHTLLLLMFSGALRRSEAARIEVSDLDFVGQGIRLRLKPSKHQLHETEI |
| | ALIPGKQYCPVSALHSWLKKSRIGEGALFRRMNRWGQLMSEPLGPQGINLMIKRRTGQAIDDLYVSGHSL |
| | RRGFITSAVTAGKPMNKIIEVTRHKDMRTLQEYFDDAHKFSDHALDGLL |
| 1526 | WP_050717134.1 |
| | MQAVFDPQLNSRARRFLRSAKADSTLNAYEADTRIFVYWCHLQQLDPLQTTHHDIMNFLADQADGILADW |
| | VWLDKQEGKGELRNGEPRKPATLVRRLAGIRYAFKQKGVHPMPTEHAEIKEMMRGIVRLGDNRKRKTGAL |
| | TLQPLTQVLDEIDTNNLAGLRDHTLLLLMFSGALRRSEAARIEVSDLEFVGQGVRLRLKPSKHQLHETEI |
| | ALIPGKHHCPVRALQNWLKKSRISEGPLFRRMNRWGQLMPDPLGPQGINLMIKRRTGQVIDSLYVSGHSL |
| | RRGFITSAVTAGKPMNKIIEVTRHKDMRTLQEYFDDAHKFSDHALDGLL |
| 1527 | OJW69670.1 |
| | MQSIFDPQLNSRARRFLRSAKADSTLNAYQADTRIFVSWCQLHGLDPLQTTHHDIMNFLADQADGILANW |
| | VWLDKEEGKGELRNGEPRKPATLVRRLAGIRYAFKQKGIHPMPTEHAEIKEMMRGIVRLGNNRKRKTGAL |
| | TLKPLACVLDEIDTSNLAGLRDYTLLLLMFSGALRRSEAARIEVNDVQFVGQGIRLCLKPSKHQLHESEI |
| | ALIPGTRYCPVSALQQWLKKSRIAEGPLFRRMNRWGQLMTDPLGPQGINLMIKRRTGQAIDDLHVSGHSL |
| | RRGFITSAVTAGKPMNKIIEVTRHKDMRTLQEYFDDAHKFSDHALDGLL |
| 1528 | VEG96551.1 |
| | MFDPALNNRARRFLRSAKADSTLNAYQADTRIFVFWCQLHGLDPLQTSHHDIMNFLADQADGILADWVWL |
| | DREEGKGELRNGEPRKPATLVRRLAGIRYAFKQKGIHPMPTEHAEIKEMMRGIVRLGDNRKRKTGALTLQ |
| | PLTRVLDEIDTSNLAGLRDHTLLLLMFSGALRRSEAARIEVSDLDFVGQGIRLRLKPSKHQLHETEIALI |
| | PGKQHCPVSALSRWLKASRLSQGPLFRRMTRWGQLTADPLGPQGINLMIKRRTGQAIDDLYVSGHSLRRG |
| | FITSAVTAGKPMNKIIEVTRHKDMRTLQEYFDDAHKFSDHALEGLL |
| 1529 | WP_084202279.1 |
| | MRSAKADSTLNAYQADTRIFVFWCQLHGLDPLQTTHHDIMNFLADQADGVLADWVWLDKEEGKGELRNGE |
| | PRKPATLVRRLAGIRYAFKQKGIHPMPTEHPEIKEMMRGIVRLGDNRKRKTGALTLQPLTQVLDGIDISD |
| | LAGLRDHTLLLLMFSGALRRSEAARIEVSDLDFVGQGIRLRLKPSKHQLHETEIALIPGKHYCPVSALQN |
| | WLRKSRISEGPLFRRMNRWGQLMAEPLGPQGINLMIKRRTGQTIDDLYVSGHSLRRGFITSAVTAGKPMN |
| | KIIEVTRHKDMRTLQEYFDDAHKFSDHALDGLL |
| 1530 | WP_080741249.1 |
| | MRSAKADSTLNAYQADTRIFVFWCQLHGLDPLQTTHHDIMNFLADQADGVLADWVWLDKEEGKGELRNGE |
| | PRKPATLVRRLAGIRYAFKQKGIHPMPTEHPEIKEMMRGIVRLGDNRKRKTGALTLQPLTQVLDGIDTGD |
| | LAGLRDHTLLLLMFSGALRRSEAARIEVSDLDFLGQGLRLRLKPSKHQLHETEIALIPGKHYCPVSALQN |
| | WLHKSRISEGPLFRRMNRWGQLMAEPLGPQGINLMIKRRTGQTIDDLYVSGHSLRRGFITSAVTAGKPMN |
| | KIIEVTRHKDMRTLQEYFDDAHKFSDHALDGLL |
| 1531 | EKB22195.1 |
| | MRSAKADSTLNAYQADTRIFVFWCQLHGLDPLQTTHHDIMNFLADQADGVLADWVWLDKEEGKGELRNGE |
| | PRKPATLVRRLAGIRYAFKQKGIHPMPTEHPEIKEMMRGIVRLGDNRKRKTGALTLQPLTQVLDGIDTGD |
| | LAGLRDHTLLLLMFSGALRRSEAARIEVSDLDFVGQGIRLRLKPSKHQLHETEIALILGKHYCPVSALQK |
| | WLHKSRISEGPLFRRMNRWGQLLAEPLGPQGINLMIKRRTGQTIDDLYVSGHSLRRGFITSAVTAGKPMN |
| | KIIEVTRHKDMRTLQEYFDDAHKFSDHALDGLL |
| 1532 | WP_081042909.1 |
| | MRSAKADSTLNAYQTDTRIFVFWCQLHELEPLKTTHHDIMNFLADQADGVLADWVWLDKDEGKGELRNGE |
| | PRKPATLVRRLAGIRYAFKQKGIHPMPTEHPEIKEMMRGIVRLGDNRKRKTGALTLQPLTQVLDGIDTGD |
| | LAGLRDHTLLLLMFSGALRRSEAARIEVSDLDFVGQGIRLRLKPSKHQLHETEIALIPGKHYCPVSALQK |
| | WLHKSRISEGPLFRRMNRWGQLMAEPLGPQGINLMIKRRTGQTIDDLYVSGHSLRRGFITSAVTAGKPMN |
| | KIIEVTRHKDMRTLQEYFDDAHKFSDHALDGLL |
| 1533 | EKB14410.1 |
| | MRSAKADSTLNAYQADTRIFVFWCQLHGLDPLQTTHHDIMNFLADQADGVLANWVWLDKEEGKGELRNGE |
| | PRKPATLVRRLAGIRYAFKQKGIHPMPTEHPEIKEMMRGIVRLGDNRKRKTGALTLQPLTQVLDGIDTGD |
| | LAGLRDHTLLLLMFSGALRRSEAARIEVSDLDFVGQGIRLRLKPSKHQLHETEIALIPGKQYCPVSALQN |
| | WLHKSRISEGPLFRRMNRWGQLMAEPLGPQGINLMIKRRTGQTIDDLYVSGHSLRRGFITSAVTAGKPMN |
| | KIIEVTRHKDMRTLQEYFDDAHKFSDHALDGLL |
| 1534 | ANT70015.1 |
| | MRSAKADSTLNAYQADTRIFVFWCQLHGLDPLQTTHHHIMNFLADQADGILADWVWLDKEEGKGELRNGE |
| | PRKPATLVRRLAGIRYAFKQKGIHPMPTEHAEIKEMMRGIVRLGDNRKRKTGALTLKPLACVLDEIDTGN |
| | LAGLRDYTLLLLMFSGALRRSEAARIEVDDLDFVGQGIRLRLKPSKHQLHETEIALVPGKQYCPVSALAR |
| | WLKQSRISEGALFRRMNRWGQLMQEPLGPQGINLMIKRRTGQAIDDLQVSGHSLRRGFITSAVTAGKPMN |
| | KIIEVTRHKDIRTLQEYFDDAHKFSDHALDGLL |
| 1535 | EHI53752.1 |
| | MRSAKAVSTLNAYQADTRIFVFWCQLHGLDPLQTTHHDIMNFLADQADGILADWVWLDKEEGKGELRNGE |
| | PRKPATLVRRLAGIRYAFKQKGIHPMPTEHAEIKEMMRGIVRLGDNRKRKTGALTLQPLGRVLDEIDTSN |
| | LAGLRDHTLLLLMFSGALRRSEAARIEVSDLDFVGQGIRLRLKPSKHQLHETEIALIPGKQYCPVSALHT |
| | WLKKSRIGEGALFRRMNRWGQLMSEPLGPQGINLMIKRRTGHRRSLCQWPQPATGIHHLGRHRRQAHEQD |
| | H |
| 1536 | WP_045972172.1 |
| | MAAELNKLSDKKLKNLHGKERDNIEFFADGAGLSAKASKVGGISWVFTYRLDGKKLNRLTIGRYPDMSLK |
| | LARDMRDKCRNWLASGKDPKLQFDLTMQESLKPVTVKEAMEYWIENYAKDSRENIDKHVSQLKKHIYPYI |
| | GNMALADCETRYWLQCFDRTKKTAPVGAGYILQMCKQALKFCRVRRFAISNALDDLTISDVGRKQSKGKR |
| | YLEDNELSQLWQSLNTNMYLPYYSNLLRILIVFGCRSQEARLSKWSEWDFDSMLWTVPKENSKSDDKIIR |
| | PIPECLKPFLEKLIYQNHKSGYLLGELKSPESVSQCGRNIWRRLEHGEEWSLHDLRRTFATKLNDMGIAP |
| | HIVEQLLGHALPGIMAIYNKSQYLPEKLDALNKWCERLDVLAGNYENVVILKAVQ |
| 1537 | WP_073614059.1 |
| | MQHLPAPIHHARDIAQLPVAIDYPAALALRQMSMVHDELPKYLLAPEVSALLHYVPDLRRKMLLATLWNT |
| | GARINEALALTRGDFSLTPPYPFVQLATLKQRTEKAARTAGRMPAGQQTHRLVPLSDTWYVSQLQTMVAT |
| | LKIPMERRNKRTGRTEKARIWEVTDRTVRTWIGEAVAAAAADGVTFSVPVTPHTFRHSYAMHMLYAGIPL |
| | KVLQSLMGHKSISSTEVYTKVFALDVAARHRVQFLMPESDAVTMLKNRQA |
| 1538 | WP_060594881.1 |
| | MLSSGITVRAAGDGFLDSIRSPNTRRSYAIAVDKTTARLGEARPLANVADDEIGETLETLWGEAAVNTWN |
| | ARRAAVASWLAWCREHGHLAPAVPAWVKRSTPPDSATPVRSRTAIDRLITRRDIDLRDKTLWRMLYETCA |
| | RTEELLQVNIEDLDLAGRCCPVKSKGAKPRTRRRGAAHHEYAHELVYWDAGTARLLPRLTKGRTRGPLFV |
| | THRRPGPRKAVADRDICPHTGLARLSYGQARALLDAATATNGPGTGWDLHELRHSGLTHLGEAGASLLEL |
| | MAKSRHRKPDNLRRYFKPSPAAMRGITSLLGPDRGHR |
| 1539 | WP_061770812.1 |
| | MTGKRKNSDDNWMPPRVYRGRSAYEFKHHNGSVIRLCSLDCTQSVVWAEYEKYIEQQKDNDTFKKLVGRF |
| | LISAEFTDLAFETQKDYHKYARKLIPVFGDVQPNDIRPEHVQRYMDKRGLKSKTQANREKTFMSRVFGWG |
| | YERGYVKGNPCKGVRQYKEKSRERYITDAEYAAVFAAAPDMVRAVMELAYLCCARQRDVLALTRNQILED |
| | GIYICQGKTGAKQIKAWSDRLRAAVALADSVPISTGIASAYVIHQQNGNRYTRDGFNSKWRNAKLAAKAA |
| | NPAMNIDFTFHDLKAKGISDLEGSLVEKQAISGHKNSSQTAIYDRKVKIVPVVGNQKK |
| 1540 | WP_075938737.1 |
| | MAKHFYLRDNQRIQNNSLLSSGSKELFTLEKSHSTIDAYESDWSDFCDWCNYRGIYFFPATPETIVNYIH |
| | DLSAYAKANTIARRVSALSENFTAGGLIKDNPCLSPLVKAAMKGIRRKIGTYQQGKSPLLKEDLEAIVOM |
| | MDIKDLTQHLDKTVLVIGFMGAFRRSELSSIRYEDVHFVRQGIEIFIPRSKADQEGEGNIVALPNLTQKE |
| | LCPVTTLKSWLSRTKITSGPVFRSPTKTGKLRKNALSDOMVNRIVKRWAEKIGLDPADYGAHSLRHGFAT |
| | SAALAGIEERRIMQQTRHHSVEMVRHYINEADRFEHNPLRDMFSAK |
| 1541 | ETI84668.1 |
| | MAKHFYLRDNQRIQNNSLLSSGSKELFTLEKSHSTIDAYESDWSDFCDWCSYRGIHYFPATPETIVNYIH |
| | DLSAYAKANTIARRVSALSENFTAGGLIKDNPCLSPLVKAAMKGIRRKIGTYQQGKSPLLKEDLEAIVOM |
| | MDIKDLTQHLDKTVLVIGFMGAFRRSELSSIRYEDVHFVRQGIEIFIPRSKADQEGEGNIVALPNLTQKE |
| | LCPVTTLKSWLSRTKITSGPVFRSPTKTGKLRKNALSDQMVNRIVKRWAEKIGLDPADYGAHSLRHGFAT |
| | SAALAGIEERRIMQQTRHHSVEMVRHYINEADRFEHNPLRDMFSSK |
| 1542 | WP_099738455.1 |
| | MSNKHSTISVAGKSHTRKTVKNITNRITKNKIVKSGSVQEYMDASQAGATKRAYGSDLRHFLAHGGAMPC |
| | TPKRLAKYLAESANDGLAVATLERRVTAIHKAHVDQKHGSPAHSEIVRQVMQGIRRTLGTKQRQVKPLTK |
| | DDLLPALETIESVHMPVRAARDRAILLIGFASAMRRSELVGVCVEHLTFSPAGLEIELPVSKTDQEQHGR |
| | TVFIPRANGSHCPVTALMCWLKTAGIRTGHVFRSVNRYDGIATQGLTPQSVALIVKGAMAQAGADARIFS |
| | GHSLRAGYCTTAAEQGLPSWQIRMQTGHKSDVTLARYIRKSDWQKAQSLL |
| 1543 | WP_066013827.1 |
| | MPSETEKSTSAPSAEHEVSRGDDRGHKESTSIALPAHVAGSGALDRLVDTARAYARAAASDNTLRAYAKD |
| | WAHFTRWCRMKGTDPLPPSPDIIGLYLADLASGSGALPSASRPLSVSTIERRLSGLTWNCAQRGFSLDRK |
| | NRHIAAVLAGIRRKHARPPVQKAAILAEDIVAMVATLPYDLRGLRDRAILFLGYAGGLRRSEIVSLDVHK |
| | DDTPESGGWIEILDKGALLTLNAKTGWREVEIGRGSTDQTCPVHALEQWLHFAKIDFGPVFVSTSRDGKC |
| | AYETRLNDKHVARLIKRTVLHAGIRPDLPETERLALFSGHSLRAGLASSAEVDERHVQKHLGHASAEMTR |
| | RYQRRRDRFRVNLTKAAGL |
| 1544 | WP_006120890.1 |
| | MMTASLPSLPGEYFQHTSRLPVAIDYPAALALRQMAAQLDDYPKYLLAPEVSALLHYIPDLYRKTLVDTL |
| | WNSGARINEALALGRTDFLLQPPYPFVQLATLKQRTEKSARTAGRAPAGSQAHRLVPLSDVNYVSQLEMM |
| | VATLKIPLERRNKRTGRTEKARIWEVTDRTVRTWLAEAVDAAAADGVTFSVPVTPHTFRHSYAMHMLYNG |
| | IPLKVLQSLLGHRSISSTEIYTKVFALDVAARHRVQFHMPGADAVAMIKGC |
| 1545 | PQV52181.1 |
| | MPNRLMPIARTDRRQLTAAEFHQLANVPPEAEWFGNLDNPRTRRAYQVDLRDFMAFIGIARPDEFRTVTR |
| | AHVLAWRKHLEARQLSGATIRRKLAALSSLFDYLCERNAVSLNPVAGVKRPKNNGNEGKTPALGDHQARA |
| | LLDAPDPVTLKGKRDRAMLAVLLYHGLRREELCLLKVRDIHDRRGTPHLRIHGKGSKLRYVPLHPASAER |
| | LHTYLESAGHDTVPDAPLFQPIRKTGTAITADGVYKCVLAWAVHAKIAVEGFGVHSLRATAATNALDHEA |
| | DIAKVQEWLGHANIATTRLYDRRKQRPEDSPTFKVAY |
| 1546 | WP_105508122.1 |
| | MPIARTDRRQLTAAEFHQLANVPPEAEWFGNLDNPRTRRAYQVDLRDFMAFIGIARPDEFRTVTRAHVLA |
| | WRKHLEARQLSGATIRRKLAALSSLFDYLCERNAVSLNPVAGVKRPKNNGNEGKTPALGDHQARALLDAP |
| | DPVTLKGKRDRAMLAVLLYHGLRREELCLLKVRDIHDRRGTPHLRIHGKGSKLRYVPLHPASAERLHTYL |
| | ESAGHDTVPDAPLFQPIRKTGTAITADGVYKCVLAWAVHAKIAVEGFGVHSLRATAATNALDHEADIAKV |
| | QEWLGHANIATTRLYDRRKQRPEDSPTFKVAY |
| 1547 | EJT85494.1 |
| | MSDAERYQQAARRASTARRYAQAIEHFEGEWGGLLPASSASVVRYLAAFGPQLSASTLRTHLAALAQWHQ |
| | RRGFVDPTKAAQVRDTLRGIQALHPQPVKQAPALQLKVLEASIEGLSADLHSALPVLRLRAARDQALILL |
| | GFWRAFRGDELCRLQAEHVRIEAGEGMQLFLPSSKTDRDNRGRNLTMPALKRLCPVQATEQWLLLSGIEQ |
| | GPLFRGIDRWGHINAQPLNANSVSRLLRRALLRSGIEAEGYSAHSLRRGFATWASRNQWSTEALMAYVGW |
| | RDVQSAARYIESHAPFGEWAR |
| 1548 | WP_035412914.1 |
| | MEEEMRNEVEIREAAALAFADSRERLLAVLEDDHLNMEALSDLEIFELFWATELFPIYSQKSPHTKRAYK |
| | QDLDYILRFFVTKTQGVKQLTILNLHEYLKDVHDQYAPRTVKRRNAMLRRFLRFLHVNDYHARDLSLQVK |
| | DQMKPEPLRREIDFDEMEAIALAFRHTVKQKKNRELLQLRNETMGYLLLTTGMRASELLSLQFNQIYQSK |
| | EFNYIEIKGKREKWRRIPLSEKTYYLLKYLNEKLISENILNPYVCFNINSTFSSITYETLRLITHEAAKV |
| | MGSEGNTPHWFRRSFITKMLTNNSPLIEVMKLSGHESITTTNKYLQDLKNERTINLPYN |
| 1549 | WP_005331670.1 |
| | MNYVKIYTKTYRDNSARYIELPSLLIEQDGETKVFEQLLKYQIKYSHKSKTWHNKLIQSVSLLFDYMNAN |
| | PNNYVSAKDFFELFAEAIYSGTIDEEGNDPSGLYWLPKKAQTANTLLSSLSDFSDWLYINYKTEQLNPWR |
| | EATRYEERLKYMALINRSERSFLGHLDDIHDISETAKTVRNVVTHKNPYAVRNGTKAFPEDKIEKLLREG |
| | FKKTRKGYELDLIDGYNWRDIAITILMHYGGLRHSEPFHLWVQDVIPDPEDPDMAIVRIYHPSEGKAPHD |
| | FKNPSTGKYVTDRASYLKLKYGLIPRNQYASSNKRFAGWKNPRLDDEDNMYMNVYWFPREAGYVFMYVWK |
| | KYLQQRIRYGIKDTHPFAFVSFDPRYLGEMMPPRTQTEAHNKACESIGLEISKFNGTTNHGHRHAYGQRM |
| | KNAGIDKKVRQVAMHHKSEESQNVYTEPTVTEVTNALSLATYSLNKGIALPMKSEISSWYEEEKKLAKKY |
| | MMRKK |
| 1550 | WP_010736891.1 |
| | MAQIKPYKKQDGTINYMFDFYVGINPKTGKKQKTTRRGFKTEEEASLALAELSLLVATEQYVPKKHHTFN |
| | EIFTLWYKQYCNLVKESTAVTAKCEFKYAILPKFQEMRIQDITPIYCQQIVNEWYKDKPKRASRFIYYFN |
| | RVMEHAMFLELIYQNPMANVKKTVTNLNLNHYEEFSNFFTKEELIEFLRFTKENFDSERYAFFRTLAFTG |
| | LRKGEAFALTWEDVNFDEKYLEVTKTVAKGDRNKILIHPPKTKAGFRRISLDNATLESLKTWREKQAIKF |
| | GLPKINPNQIIFSNYKNTYLESGITKEWFLTIQRLYRKKTGKEIKTITMHGFRHTHASLLYKANIPIKEA |
| | QERLGHSNVKTTLNIYTHLSKDQRDKTANRFAEFMNEI |
| 1551 | WP_010752316.1 |
| | MAKFEQYKKKNGEKAWKFQAYLGINPETGKPVKTTRRNFKTQREAKLALARLQSEYEDNLLKNDKPKTYK |
| | DVYDLWMTEYKRTVRGSTLLKTERIFKNHVLEELGDIYISEITPIKIQKLMDKWANKYDTAPKMMNYTGL |
| | VFKYAVRFGIIESNPTDAIRKPKRRKKATVEEPFYDKKQLKLFLDELYNQPNLKIQAFFRLLAMTGMRKQ |
| | EAGALEWRDIDFKAKTVNIYKAVTRTANGLEIDTTKTVGSSRIISIDQGTLDKLLEWKEAVLPPSDEWLV |
| | FGHSSAKNPHDIMSLDTSRKWLLNIQDQMDKKQKKKLPRITVHGFRHTQASLLIEMGASLKEVQFRLGHE |
| | DIQTTMNTYAHVSKLAKEQLADKFNKFIDL |
| 1552 | PKP94160.1 |
| | MVDRRTVDLVVQDVRGLVGPAVLLDTELVAAAVRGWSHNTRRAFRSDLCLWGDWCRRQRVAPASADAGVV |
| | AAWIRALAGMDPSGETVRAMATIERYVVNVGWAYRMAGLDDPTAAPLVRLEKKAARKHLGVRQRQARAIR |
| | FKGDIADFDSPASGVCLAHLLKACRRDLLGFRDEALLRTAYDSAGRRSELVAIDVDHIEGPDGQGAGTLF |
| | IPTSKTDRQGEGAYAYLAPSTMTAIARWREAGHIDRGALFRRVETHFDGSVAGVGRAALHPNSITLIYKR |
| | LIRAAHAKKLLGAMGEAELERWVSAVSSHSIRVGVAQDNFAADESLPAIMQAYRWRDPRTVMRYGAKLAP |
| | KSGASARMAKRFSES |
| 1553 | WP_014953267.1 |
| | MSNLTTDLKAIQEETLLNLKASKSNNTIRAYKSDFHDFGLFCVKNGFKSLPSNPKTVSLYLTYLATKNMK |
| | ISTIKRRLVSIAVVHKMKGHYLDNKHPSIIENLLGIKRRKGIKQKGKKPLLINNLKQIINVIDENNSSEI |
| | KIYRDRSIILLGFGGGFRRNELVSLNFDDLDFVNEGLKVSIRKSKTDQYGEGSIKALPYFDNPQYCPVKS |
| | LQKWLEISKIKEEAIFRKFHKGTKISNIRLSDQSVALLIKYYLNKAGIDSSDYSGHSLRSGFATSAAEAG |
| | AEERSIMEMTGHKSTEMVRRYIKEANLFKNNALNKIKL |
| 1554 | WP_065997227.1 |
| | MRGIRTISNSADVLRRAEALDALDAVLPFDRREFLAEILSDDDVETLRHLAREGIGENSMRALASDLAYL |
| | EAWCRAATSDPLPWPAPEALLLKFLAHHLWDPARRETDPTHGMPADVSAALMQAGLLRAKGPHSPSTVRR |
| | RLSSWSTLTQWRGLQGKFNAPRLRNATKLAVRASLRPRHRKSAKAVTADVLGALLKACAGDRLVDVRDRA |
| | LLMVAFASGGRRRSEVSSLRIAQLMEQDPVPADPDNPHSALLPCVSIHLGRTKTTEADDSAFVLLIGRPV |
| | AALDDWLARAGITEGAVFRRIDRWGHLERRALTPQAVNLILKRRILQCGLDPQEFSAHGLRAGFLTEAAR |
| | RGIPLPEAMQQSQHRSVQQASRYYNDAERRHGKAARLIV |
| 1555 | WP_015241550.1 |
| | MAKTPPSPSEDVHRRAEELDALDAILPFDRRDQLAALLTDDDVETLKHLASEGMGENTLRALASDLGYLE |
| | AWCRLATGAPLPWPAPEALLLKFVAHHLWDPVKRAEDPAHGMPADVEAGLRAERLLRSPGPHAPGTVQRR |
| | LTSWSILTRWRGLTGAFAAPSLKSTLRLAVRASARPRQRKSKKAVTVDILAKLLQACAGDRLVDLRDHAL |
| | LLTAFASGGRRRSEVAALRVEDLTDEEPVRADPSDKNSPPLPCLSIRLGRTKTTTADENEHVLLIGRPVA |
| | ALKTWLAEAQIKDGPVFRRIDQWGNIDRRALTPQSVNLILKARCEQAGLDPALFSAHGLRSGYLTEAANR |
| | GIPLPEAMQQSLHKSVTQAASYYNNAERKNGRAARLIV |
| 1556 | WP_113480034.1 |
| | MAKTTPSDAIHRRAEELDALDSILPFDRRDQLASLLTDDDVVTLKHLAGEGMGDNTLRALASDLGYLEAW |
| | CQLAIGGPLPWPAPESLLLKFVAHHLWDPVKRAEDADHGMPADVEAGLRDSRLLRAKGPHAPDTVRRRLT |
| | SWSVLTRWRGLTGAFNGPSLKSALRLAVRASARPRQRKSKKAVTADILAKLLQACAGERLVDLRDRALLL |
| | TAFASGGRRRSEIAGLRVADLVDEEAVRADPNDANSPRLPCLSIRLGRTKTTTSDDDEHVVLIGRPVVAL |
| | KHWFEQANVKDGPVFRRIDQWGNIDRRALTPQSVNLILKTRCKQAGLDPALFSAHGLRSGYLTEAANRGI |
| | PLPEAMQQSLHKSVTQAARYYNDSERKQGRAARLMI |
| 1557 | WP_104840046.1 |
| | MIKQHRTADSNSQALHRRAEELDALDAILPFDRRDQLAALLTDDDVATLKHLASEGMGGNTLKALASDLG |
| | YLEAWCRLATGSPLPWPAPEALLLKFVAHHLWDPVKRAEEPAHGMPADVEAGLRCEGLLRAKGPHAPGTV |
| | RRRLTSWSILTRWRGLSGAFGAPSLKSALRLAVKASSRPRQRKSKNAVTGDVLAKLLATCAGDRLVNRRD |
| | MALLLTAFASGGRRRSEVAGLRVEDLNDDEPVHADPADKTSPPLPCLSIRLGRTKTTTSDDDEHVLLIGR |
| | PVAALKRWLEDAGIKDGPVFRRIDQWGNVDRRALTPQSINLILKTRCKQAGLDPVLFSAHGLRSGYLTEA |
| | ANRGIPLPEAMQQSLHKSVTQAASYYNNAERKNGRAARLI1 |
| 1558 | PZN95492.1 |
| | MPGSPASPPKIGDLAVARINGGQPDIAEPDMETGAAAPATLISARLEALVETATGYAKAASSENTRAAYA |
| | KDWRHFSSWCRREGLEPLPPSSQVIGLYISACAAGEPKRGLPSLSVATIERRLSGLGWNFNQRGQPMDRA |
| | DRHISTVLAGIRRKHAKPPRQKEAVLGDDLLAMIATLGHDLRGLRDRAILLLGFAGGLRRSEIVGLDVVR |
| | DENSDGAGWIEIYADKGVLVTLRGKTGWREVEVGRGSSDHTCPVVALETWVRFGRIARGPLFRRIFKDNK |
| | TVDVERLSDKHVARLVKQTALEAGVRSDLPEGERALLFAGHSLRSGLASSAEIEERYVQKHLGHASAEMT |
| | RKYQRRRDRFRTNLTKASGL |
| 1559 | WP_057795742.1 |
| | MDSETEKSTSAPSGAVDDARGDESEQEAPNSIALPAHVAGSGTLDRLVDTARDYARAAASENTLKAYAKD |
| | WAHFARWCRMKGAEPLPPSPEMIGLYLADLASGSGPSPALAVSTIDRRLSGLAWNYAQRGFTLDRENRHI |
| | ATVLAGIKRKHARPPVQKAAILAEDILAMVATLPFDLRGLRDRAILLIGYAGGLRRSEIVSLDVGKDDTP |
| | DSGGWVEILEKGALLTLNAKTGWREVEIGRGSKKQSCPVHALEQWLHFARIDFGPVFVGTSRDGKRASET |
| | RLNDKHVARLIKRTALGAGIRADLPEKDRLALFSGHSLRAGLASSAEVDERYVQKQLGHASAEMTRRYQR |
| | RRDRFRVNLTKAAGL |
| 1560 | WP_089423562.1 |
| | MPSETEKSTSAPSDTNKDAPLDERDQKESDSIALPTHVAGSGTLDRLVYTARDYARAAASENTLKAYAKD |
| | WAHFARWLRMKGADPLPPSPEMIGLYLADLASGSGPSASQSASRPLSVSTIERRLSGLAWNYTQRGFTLD |
| | RNNRHVATVLAGIKRKHARPPVQKEAILAEDILVMVATLPYDLRGLRDRAILLLGYAGGLRRSEIVSLDV |
| | HKDDTPDSGGWIEIFDKGALLTLNAKTGWREVEIGRGSKDQTCPVHALERWLHFAKIDFGPVFVGSSRDG |
| | KRPSDTRLNDKHVARLIKRTVLNAGIRSELPEKERLALFSGHSLRAGLASSAEVDERYVQKHLGHASAEM |
| | TRRYQRRRDRFRVNLTKAAGL |
| 1561 | WP_023721997.1 |
| | MPDIVDVVDIISTEMGRGEASDEAPFHALRPAPGLPAHLERLADRARDYVDAASSANTRRAYASDWKHFC |
| | AWARRQHLEVLPPDPQTVGLYITACASGKVTGDKKPNSVATIERRLSSLAWNYTQRGEPLDRKDRHIATV |
| | LAGIRKSHAKPSVQKEAILPEDLIAMLQTLDRGTLRGLRDRAMLLLGFAGGLRRSEIVGLDVGRDQTDDG |
| | RGWVEILDKGALVTLRGKTGWREVEIGRGSADATCPVVALQTWLKLARIAHGPLFRRVTGQGKAVGAERL |
| | NDQEVARLVKRAALATGVRGDLSEGERQQKFAGHSLRAGLASSAEVDERYVQKQLGHASAEMTRKYQRRR |
| | DRFRVNLTKASGL |
| 1562 | WP_066052221.1 |
| | MERAVNEFASYLRNDKHSSENTVLSYIRDLRGFTEFMRVCGVSDALMVNYTNVMSYIYELQSKKKAGATV |
| | SRNIASIRAFYNYLIRQGAITDNPAANLELPKIEKKMPGILTLDKVEQLLEQPQGVDPKGIRDKAMLELL |
| | YATGIRVSELISLKVSDVNLPLEYIRCGVERKSRIIPIGSQAKAALRKYIEKGRSRMILADDEEMLFVNC |
| | NGKPMTRQGFWKIIKCYAKKAGIDEEITPHMLRHSFAAHLIENGADLKSVQEMLGHSDISSTQIYVKLTN |
| | QKLKSVYAKAHPRA |
| 1563 | WP_047138903.1 |
| | MRRTVLTYDVRVYSIETRKDRPKPYRLHWLVGDRKHSKSYTLRAQADGRRSELMTAARKGEQFDRDTGLP |
| | VSELRAQRGSVTWYQHTRAYIDRKWAAAPAKSRKNYADALATITPALVKAAKGRPDAALLRAALYGWAYN |
| | RNRWDLTPPEEIAAALAWVQKNSLPVSELEEAKTVRAALDALSLKLDGTPAAPRTARRKRACLSEVLGLA |
| | VEEKYFTVPVNPITTVKWTPPKSVEEVDPDSVANPRQVRALLRAVREQGPRGAHLEAFFGCLYYASMRPA |
| | EATALTLAQCHLPASGWGTLTLRKGAVRAGRGWTNDGSAHEARHLKARAEKDSRPVPIPQHFVRQLRQHV |
| | AVHGTAPDGRLFRTNRGGLLQETGYGEVWAAARQSALTEPEAASLLARRPYDLRHAGVSFWLSSGVDPME |
| | CARRAGHSVAVLLRVYAKVLARTQERANKRIEEAMRAWNEPE |
| 1564 | WP_005824123.1 |
| | MKKSTLSQQLFSQYFSDWVATYKEGAIRLVTMKKYRSTLHWIETLAPKLRVGDLSRITYQKLLNDYAQTH |
| | ERQTTMDFHHQLKGAILDAVDEGLLDTDPTRKAIIKGKAPKSKKIKYLNQFELQALLNSLELEQKINWDW |
| | FILLVAKTGMRFSEALAITPEDFDFAHQTLQVNKTWNYKEKGGFSPTKNRSSIRKIQLDWQTVIQFSQLI |
| | KDLPPDKPIFPCDTAIYNSTINGMLARICRKAKVSTISIHGLRHTHASLLLFAGVSIASVARRLGHSSMT |
| | TTQHTYLHIIQELENQDTDIVMRHLAGLC |
| 1565 | WP_000817856.1 |
| | MKREILLERIDKLKQIMPWYVLEYYQSKLAVPYSFTTLYEYLKEYDRFFSWVLESGISNADKMSDIPLSV |
| | LENMSKKDMEAFILYLRERPLLNANTTKQGVSQTTINRTLSALSSLYKYLTEEVENDLGEPYFYRNVMKK |
| | VSTKKKKETLAARAENIKQKLFLGDETEGFLTYIDQEYPQQLSNRALSSFNKNKERDLAIIALLLASGVR |
| | LSEAVNLDLRDLNLKMMVIDVTRKGGKRDSVNVAAFAKPYLENYLAIRNQRYKTEKTDTALFLTLYRGVP |
| | NRIDASSVEKMVAKYSEDFKVRVTPHKLRHTLATRLYDATKSQVLVSHQLGHASTQVTDLYTHIVNDEQK |
| | NALDSL |
| 1566 | WP_015217782.1 |
| | MLINRNGQAKVLTKSEIQQLFHNGFKSSRDKALFAVAFYTACRISEARKMFIIDAFYDGKVRDEIIIRKA |
| | HSKGKQGTRSIPTHPNLKKILQEYYDNSAKLVEMKKMIGDWSEKSFNCEGKIIINLAHQCPRCQFAGIFK |
| | NGVCNNQQRYKCKKCRHEFFERELPKTDLASENSSAIEFDPLGVTCSTLYGFLLEKSDNPFLFPGRRSKG |
| | YISLRNAMSIFVYAFDKLGIDGASTHSCRRTALTMMHREGVILKVLQEISGHKDLGALQKYLEVSEEQAR |
| | AAINIL |
| 1567 | WP_070726079.1 |
| | MSEDLSIVPASNATPTVSTQLARASAKVAGFLETGLQGAANTERAYTSDLKSYGAFCEHHGFVALPADVE |
| | TLTEYVAFLATEKPEPTLGDGREKKKGQQPLTRPHSLATIKRHLAAIRKAHQLAGHRLPATLDALNIVME |
| | GIARTLGKRQDQAQAFTVEELKQAILRIDLETSAGLRDRALLLLGFSGAFRRSELVDLNIEQLEFTERAL |
| | LVHLAKSKTNQYGAVEDKAIFYAPNADFCPVRCLRTWLNLLGWTTGPLFVKIPRAAPGQMAAPSDKRLSD |
| | ISINKLVQKRLGPAYSAHSLRVSFVTVAVLNGQSHKAIKNQTKQKTDAMIERYTQLNNVVSYNAAQALGL |
| 1568 | WP_000059622.1 |
| | MSLTDAKIRTLKPSDKPFKVSDSHGLYLLVKPGGSRHWYLKYRISGKESRIALGAYPAISLSDARQQREG |
| | IRKMLALNINPVQQRAAERGSRTPEKVFKNVALAWHKSNRKWSQNTADRLLASLNNHIFPVIGNLPVSEL |
| | KPRHFIDLLKGIEEKGLLEVASRTRQHLSNIMRHAVHQELIDTNPAANLGGVTTPPVRRHYPALPLERLP |
| | ELLERIGAYHQGRELTRHAVLLMLHVFIRSSELRFARWSEIDFTNRVWTIPATREPIIGVRYSGRGAKMR |
| | MPHIVPLSEQSIAILKQIKDITGNNELIFPGDHNPYKPMCENTVNKALRVMGYDTKKDICGHGFRAMACS |
| | ALMESGLWAKDAVERQMSHQERNTVRMAYIHKAEHLEARKAMMQWWSDYLEACRESYAPPYTIGKNKFIP |
| 1569 | WP_015369806.1 |
| | MAISKGAKRTDGLESADQVKLVVEEIAKKSQTVADLFLLGVETQLRGVDMRSWRWVELDIGSKVLRITOD |
| | KTKEAVEVELTETAREVLKARYNERGENVYVFQNDSNRSKGKPISRSKIHAEIQYAVDKLKMRGLLPQDA |
| | VISMHSSRKTIASIAHAQGEDLEVISKMLGHRSTEHTRAYLGITQAKVDALRTKYSTGIKRVTLR |
| 1570 | WP_013058885.1 |
| | MEFVKDVLNSFLEYLQIEKNYSKYTVDCYEKDIGIFMSFMQEEQIQNLOSVTYADARLFLTRLYEKQYSK |
| | RSMSRKISCLRTFYRYLNREELVEDNPFALVTLPKKEERNPRFLYEEEIVKLFQMNDLTTPLGQRNQSLL |
| | ELLYATGIRVSECASIKLSDIDFSLQTLLVYGKGKKQRYVPFGCYAKGALRVYIDNGRKLLLKKAPSDTH |
| | SLFLNYKGTPLTDRGIRLVIDQLVKKTAENIHISPHVLRHTFATHMLNEGADLRTVQEMLGHEHLSTTQI |
| | YTHVTKDRLKAVYMNHHPRA |
| 1571 | WP_013058263.1 |
| | MKKNSLEVIPLIDDFSQWLIESGKSDNTIKTYRAVLNQFHEWLLSEGRHLDQVTKNNVQTYMINLESNNK |
| | SASTIEKAFVTISVFARFLEKPEIVQNIERKRKEKNNEVVPQSLEASELDRLLSEVKQQGNLRDIAIVYT |
| | LLHTGVRVSEICALNHKDVEINKSDGFLIIRNAKGCKKRFVPLSTEARNSLKKYIDSLDSNHEALFVSNE |
| | DRRMSPRTVQYMLKKYNVNPHKLRHTFCHELVKKGIDIATVAELAGHSDVNVTKRYLKSSTRDLENAITQ |
| | TFL |
| 1572 | WP_056922110.1 |
| | MLPRIGGLRLRELTTPVVDRFVLDVYQDVGAATARTCRSIVSGALSLAVRQGAIAANPARELERLEGTRA |
| | KEPRALTSEEQAKWFMGMTGDQVAVRQDLVDFSAFLLATGLRIGEALAVLWTEVDLDTGALTVTSTLIRV |
| | TGQGLLRKTTKSKAGQRALLLPTWCVAMLRRRSEVGVAPDEPIFATVDGRFRDPRNVSRQLADARDRLGF |
| | GWVTSHTWRKTMATILDGGGASPRMIADQLGHSRVSMSLDFYLGRRSVDPRVLAALEAVDPRRFTLESGG |
| | QSGGSVAQGEGT |
| 1573 | WP_054448037.1 |
| | MTRYPKRGKGARWTVKELEAVPAEWAGDHLADGDGLTGEIRIQRGTMAVVWRYAYRLGDKVKRFYCGSWP |
| | ERTLDEIRTARNKARADIKAGRNPSAVRDLEKAQAREAVAAESAAVTAAEEAATTDALSVREMYKSWLES |
| | GVKRADGNTEVMRIVEKDVLPLIGDTAVRSIREKDIERVIRSIVGRGCNRLAEVTFQILGQMFHWAEKRQ |
| | PWRKLLSEGNPVELVELGVLLADDYDPDNVRERVLPPIEIVELQTRYRELEEQYLTSDDKRKRKPPSEAL |
| | QAVSWICLSTLCRIGELHLTEIAHLDLREGTWFIPKANVKGRKSQKRDHLVFLSPFAIKHFETLVSLAGS |
| | SRWLLPSRDNDAEVDQPMYKQAFTKQIKDRQAMFNGKSKARRASDNSLVLGKGQSGNWTPHDLRRTGSTI |
| | MESLGIDPNIIDRCQNHAIHTGKNRVRRHYQLYDYADEKQAAWAKLGEYLERLLSGAMAPAELQKRLTTK |
| | QLLAA |
| 1574 | WP_010744610.1 |
| | MDEQITEYLHYLSIERGLSDNTRISYQRDLHQYLSFLNDQGVTDWQAVDRYTVVAFLTSLTEAGKASTTI |
| | TRMISSLRRFHQFLRQERYTDHDPMQHIDSPKKAQKLPQTLSLTEVERLIAAPDTTTDLGIRDRAILEVM |
| | YATGLRVSELIGLRLGDIHLEMGLLQTIGKGDKERIVPLGDYAIHWLERYLSEVRPLLTKKTPNEMFLFV |
| | NNHGHGMSRQGIWKNLKQYVIKAEITKDVTPHTLRHSFATHLLENGADLRTVQELLGHADISTTQIYTHI |
| | TKRRMTEVYKEFFPRA |
| 1575 | WP_016179937.1 |
| | MDEQITEYLHFLTIERGLSENTRVSYQRDLHQYLSFLSEQGVTEWQAVDRYIVVAFLANLTEAGKASTTI |
| | TRMISSLRRFHQFLRQERYTDHDPMQHIDSPKKAQKLPQTLSLAEVERLIAAPDTTTDLGIRDRAILEVM |
| | YATGLRVSELIGLKLGDIHLEMGLLQTVGKGDKERIVPLGDYAIHWLERYLTEVRPLLTKKTPNVMFLFV |
| | NNHGHGMSRQGIWKNLKQYVIKAEIMKDVTPHTLRHSFATHLLENGADLRTVQELLGHADISTTQIYTHI |
| | TKRRMTEVYKEFFPRA |
| 1576 | WP_049220444.1 |
| | MDEQITEYLHFLTIERGLSENTRVSYQRDLYQYLSFLSEQGVTEWQAVDRYIVVAFLANLTEAGKASTTI |
| | TRMISSLRRFHQFLRQERYTDHDPMQHIDSPKKAQKLPQTLSLAEVGRLIAAPDTTTDLGIRDRAILEVM |
| | YATGLRVSELIGLKLGDIHLEMGLLQTVGKGDKERIVPLGDYAIHWLERYLTEVRPLLTKKTPNVMFLFV |
| | NNHGHGMSRQGIWKNLKQYVIKAEIMKDVTPHTLRHSFATHLLENGADLRTVQELLGHADISTTQIYTHI |
| | TKRRMTEVYKEFFPRA |
| 1577 | WP_088932358.1 |
| | MDEQITEYLHYLSIERGLSENTRISYQRDLQQYLSFLTDQGVSEWQAVDRYMVVSFLTNLTEAGKASTTI |
| | TRMISSLRRFHQFLRQERYTDHDPMQHIDSPKKAQKLPQTLSLAEVERLIATPDTTTDLGIRDRAILEVM |
| | YATGLRVSELIGLRLGDIHLEMGLLQTVGKGDKERIVPLGDYAIHWLERYLAEVRPILTKKTPNETFLFV |
| | NNHGHGLSRQGIWKNLKQYVIKAEIMKDVTPHTLRHSFATHLLENGADLRTVQELLGHADISTTQIYTHI |
| | TKRRMTEVYKEFFPRA |
| 1578 | WP_021268046.1 |
| | MAIRCYEKDGKKLYQVYVNARSKTDRKLRVQKTVSDLKSLSLARREENRINQELGKKLTELEGLCDTWES |
| | VIDKWEHEARSGFLGTYNPATIMDHVASLRNWTKSWLKTPASELGKANGRDLVKRMTNAEKSISFIKKVK |
| | NTVNLVYNFGIEEGLIKGVHQSPVYGIKLHHKKEKVPDILTLEEIKQFLYEARRQEHPWYPIWATALLTG |
| | MRSGELYALEWNDVDFENEIVRVSKSFNKRTNEIKSTKAGYWRNVPMSPELKELFISLKSSSKDKFVLPR |
| | FNDWRRGDQSKILKMFLIGNGLPKIKFHALRACFATQLLAKGTPAAIVMKICGWRDLKTMELYIRVAGVD |
| | EKGATDCLSILPSEVDVADNVVSLFHS |
| 1579 | WP_051517528.1 |
| | MTLIAQSTQAALDPIQLVLDSVTSPLTKAAYKKALTDFFVWWEEQGRPPLSKAVVQRHVALLVEQGLSPS |
| | SINVRLSALRKLVREAADNGLLGAFEAETIARVKGVKQQGRRSGTWLSKAQAQALLLAPDTTTLRGLRDR |
| | AILAVLLGCGLRRSELVGLTFAHLQQREGRWVILDLTGKHGRTRTVPMPAWCKAAVDAWTRTAGLSTGHV |
| | FRPTAPRGEHVLARQRLSHEAVALIVRKYGRQLGHNHLTPEDLEGVRLAPHDLRRTFAKLAHKGGAPIDQ |
| | IQLSLGHASIQTTEVYLGVDQDLESAPCDVLGLSLKGG |
| 1580 | WP_100251739.1 |
| | MTLPATLAARARAFADEALSENSRRAYRADWQHYARWCGGHDLAPLPAGPEQVASYLTSMAETHKRATIE |
| | RRLVTIGQAHKLQGLPWVPAHPAVRAALRGMFRRYGRPKKQAAALGVPETLRIVAACEGTVAALRDRALF |
| | LLSFAGAFRRSEVARIRHEDLAFRDGAVDVFLPHSKGDQDGEGTVVTVLAGGSPATCPIAALRRWLQAAP |
| | ADGYVFRAVRADGTVMDDGLHPDSVGRIVQKRAAEAGLVAGPRERISAHGFRAGFITEAYRRGSRDEEIM |
| | AHSRHRDLKTMRGYVRRAKLADAHPGRNLGL |
| 1581 | WP_020094536.1 |
| | MTLPATLAARARAFADEALSENSRRAYRADWQHYARWCSGHDLAPLPAGPEQVASYLTSMAETHKRATIE |
| | RRLVTIGQAHKLQGLPWVPAHPAVRAALRGMFRRYGRPKKQAAALGVPETLRIVAACEGTVAALRDRALF |
| | LLSFAGAFRRSEVARIRHEDLAFRDGAVDVFLPHSKGDQDGEGTVVTVLAGGSPATCPVAALRRWLQAAP |
| | ADGYVFRAVRADGTVMDDGLHPDSVGRIVQKRAAEAGLVAGPRERISAHGFRAGFITEAYRRGSRDEEIM |
| | AHSRHRDLKTMRGYVRRAKLADAHPGRNLGL |
| 1582 | WP_103985118.1 |
| | MTLPATLAARARAFADEALSENSRRAYRADWQHYARWCGGHDLAPLPAGPDQVASYLTSMAETHKRATIE |
| | RRLVTIGQAHKLQGLPWIPAHPAVRAALRGMFRRYGRPKKQAAALGVPETLRIVAACEGTVAALRDRALF |
| | LLSFAGAFRRSEVARIRHEDLAFRDGAVDVFLPHSKGDQDGEGTVVTVLAGGSPATCPIAALRRWLQAAP |
| | ADGYVFRAVRADGTVMDDGLHPDSVGRIVQKRAAEAGLVAGPRERISAHGFRAGFITEAYRRGSRDEEIM |
| | AHSRHRDLKTMRGYVRRAKLADAHPGRNLGL |
| 1583 | WP_014350944.1 |
| | MTEDTGALALPDPVRAQLRRGVRSVLVDTAALREVRQRFADDQAATLARYLEASQSANTVRAYRTDWIAW |
| | TAWCAAEGRQALPADALDVAVYLAAAADARTDDGAPAFAPATLERKSAAIAAVHAANGLPSPTRSDVVRL |
| | TLRGIRRTRRARPVRKRPILLHTLEQLLDGLPAPGWPTEPARRRDTLALLIGFAGALRRSELAALRVGDV |
| | HVTQDHTTGEPVLLIHLPTSKTDPTGITEQRVALPRGTRPHTCPVCAFADWIALLAVYTSAPGRLREQLT |
| | AAPQPDPNIHRCHGFTGLPPALLPDQPLFPAVTRHGGIGSTPISGRAIAELVKRYAARAGLDPALFSGHS |
| | LRAGFATQAALGGAADREIMRQGRWSNPRTVHRYIRTANPLDDNAVTKLGL |
| 1584 | WP_024545567.1 |
| | METSLAQPSPFSVPTDNPDILSQLLENQKSPHTWRAYKKDIRDFFRFVADANEPTPILIEALLKLEQPQA |
| | LALVLRYKNHLRDVRCLKEATINRRLAALKALVRLANQLGQCRYTLDGIRGEKVIHYRDTTGVSQNIYRQ |
| | ILKMPDQSTTKGKRDYAILRLLWDNALRRNEVVQTNLGDLDLERRSLDILGKGKGNQKEQITLSRATVTA |
| | LESWLTVRPGPKEKNQPLFVALDRAHQGHRLTGTAIYQLVRSTARAAGVQKVLSPHRIRHAGITAALDAT |
| | NGDVRKVQKFSRHADLNTLMIYDDNRRDVQGEITDLLAGLI |
| 1585 | WP_022614960.1 |
| | MTNLKKSNPFKNRVVRRADGISKNANEKALKKRSALSEAPSFKHYRKMLDTIYLYNPVLSLLFEMQSLTG |
| | LRYSDASTLIRNDFYDEVTGNFKPHFEFTPLKTYSLALDRIKNKDKNNSSSDDIEAKARNEAILTIFTND |
| | RIREVIDEVEELNGHIDSQFLFASEHVFSGGNPISIQYANRLLKRLHVDHPDLGFKETGTHSWRKYFATS |
| | MVELNGANLVQVQALLGHRDVNTTAKYVSKKKSDLQELIMQMKTEAA |
| 1586 | WP_071974181.1 |
| | MTRNDEKLRPEPPNAATTDGHNADGAALTLPAHVAGSGTLDRLVDTARDYARAAASENTLKAYAKDWAHY |
| | TRWCRMKGTEPLPPAPEMIGLYLADLAAGSGPSPSQAAHRPLSVSTIERRLSGLAWNVAQRGFTLDRRNR |
| | HIATVLAGIRRRHARPPVQKEAILADDIRAMVATLPHDLRGLRDRAILLLGYAGGLRRSEIVSLDVHKDD |
| | TPDSGGWIEIFDKGALLTLDAKTGWREVEIGRGSRDQTCPVHALEQWLHFAKIDFGPVFTGTSRDGRRAL |
| | DTRLNDKHVARLIKRTVLDAGIRSDLPDQERLKLFSGHSLRAGLASSAEVDERYVQKQLGHASAEMTRRY |
| | QRRRDRFRVNLTKAAGL |
| 1587 | WP_009557265.1 |
| | MPKRRAERGTVQFNNCNGSLRLLWTYQGERYSLALGLRNTPYHQKLANDRALWLTREIQYGRFNLEKLDQ |
| | YREFLRGENVSLSELPTVKAPPLSQLWQQYLEVRNLGKSPSTIRQYNWVTRHIDRLPTKDTRQPQAILDA |
| | IAKLSPDVQKRLLTQFCACAKWAQKSGLLTDNPFLGAAAAVKLPQRGTVEDEIHPFSRAERDQIIQAFRN |
| | DLHYQHYANLVAFLFFTGARPSEVVPLQWGHVKANYILFEKSRVDTVTGYQTKQGLKTQNCRRFPVNEQL |
| | RAILVGMERSDDESLVFPSVKGTYIQWNNFTNRAWKSVLSKLPEIEYRNPYQMRHSFVSHCRSLNVPSIQ |
| | VAEWIGNSVEMVDRVYAQVTESHSVPLL |
| 1588 | WP_069855669.1 |
| | MSSSRSVPAPATWENGVAAAAPPVLTDAMTARITESMAASRAESTTRAYASAWRRFEGWCTANGHVALPA |
| | HPASVAAYLVDAADTFTPDGERAYAPATFSKWIAAISHVHGRSGHTSPTTHETVRATLSGIRRSYASAGD |
| | RPRKQRAPLLVSDIVTMVTVARDSVTAWASEVLERRDSALLLMGFAGAFRRSELVGLNCGDVVVHRLDGL |
| | HIRLRKSKTDQDGDGAIRALPFTNSHTSCPPCAALRWWELVAAHERGGRAALIRTLRNAPAFDGHVCRGA |
| | LPKISPHAPFFRAIAKNGNLSTTALSAAAVHGAVRRRAGAAGYDESLVAALGGHSLRAGFVTQAFRNGAD |
| | AHAIMRQTGHKTPAMLEVYARENAPLIGNAVTDIGL |
| 1589 | WP_085421389.1 |
| | MTRIVDQNPENYPQEHSAASDSTADSADVSAPGASAGLPSPLPDANAGLPAHLQDLSDRARSYVEAASSA |
| | NTRKAYASDWKHFAAWCRRQNLSPLPPDPQVVGLYITACASGTAERGMKQNSVSTIERRLAAIGWNCSQR |
| | GMPLDRRDRAIATVMAGIRNRHAAPPRQKEAILPEDLIAMLETLDRGTLRGLRDRAMLLIGFAGGLRRSE |
| | ITGLDLGRDQTDDGRGWIEIFEKGLLVMLRGKTGWREVEIGRGSSDATCPVAAVETWIRFAKLAKGPLFR |
| | RVTSGGKDVGPDRLNDQEVARLVKKTALAAGVRGDLSEGGRAEKFAGHSLRAGLASSAEVDERYVQKQLG |
| | HASAEMTRRYQRRRDRFRVNLTKAAGL |
| 1590 | WP_062446129.1 |
| | MFPETISAVLQGASDRLVLAARSPATLRAYRTDWVAFVAWCSAQNVTALPAQPETVSAWIASRLEQGRKA |
| | GTLARGVAAVSCAHELAGFEGFSRSRVVQDALRGMRRTLGTAPTRKAPATVDLLRRMLDVQPNTLIGLRN |
| | RALLALGFAGALRRSELATLEVGDLVPQEGGALLTLRRSKTDPDGAGQTIGILNGSTIRALDHLAAWCEA |
| | ARITSGRLFRSVDRHGRTGESLSDRSVARIIKTAAEAVGLDPERFSGHSLRAGFITSGAEAGADALLIAE |
| | TSRHQSLDVLRTYVRRASLLKAHAGQRFL |
| 1591 | WP_008726205.1 |
| | MTATPKLQPNHTLDLFEKYLVARNKSPNTICVYRYAVEQFYHLYPQLTPRNLQLYKVYLLEHYKPQTVNL |
| | RIRALNCFMEYRQTSITPITMIKIQQKTYLDKIISQADYEYLKRKLVENEEFTYYFIVRLITTTGVRVSE |
| | LITFQIEDIDRGHKDIYSKGNKMRRIYVPTQLGIEFKQWFQHIGRRSGHLFLNRFGSPLSPSGIRAQFKV |
| | FAARYHLDPEVMYPHSFRHRFAKNFIEKCGDITLLSDLLGHESIETTRIYLRRSSSEQYRIINKVVDW |
| 1592 | WP_054528982.1 |
| | MNADAPEPPAQPSPAAALPVPFPDPFVAEVVEDVRDLVGAGVRLDAELVSAAVRGWSDNTRRAFRSDLTV |
| | WGDWCRRHGVVPARATPSHVAAFIRALSGIDPSAEEIRAMATIERYVSYIGRAYRLAGLPDPTSGELITF |
| | EKKAARKKRGVRQRQARAIRFKGDIADFDSPASGVCLAHLLKAVRRDEMGLRDEALMRVAYDVAARRSEV |
| | VAIDVDHIHGPDAQGAGALFIPSSKTDQEGEGAWGYLSPATMKAIARWREAARIDKGPLFRRIETHFDGS |
| | IAAIGTKRLHPNSINLIYKRLVQRAFDKKLLGPMSEAEVARWVAAVSSHSLRVGVAQDNFAAREPLPAIM |
| | QAYRWRDPKTVLRYGAQLAVKSGAAARMAARVNES |
| 1593 | KPL69881.1 |
| | MPVPFPDPFVAEVVEDVRDLVGAGVRLDAELVSAAVRGWSDNTRRAFRSDLTVWGDWCRRHGVVPARATP |
| | SHVAAFIRALSGIDPSAEEIRAMATIERYVSYIGRAYRLAGLPDPTSGELITFEKKAARKKRGVRQRQAR |
| | AIRFKGDIADFDSPASGVCLAHLLKAVRRDEMGLRDEALMRVAYDVAARRSEVVAIDVDHIHGPDAQGAG |
| | ALFIPSSKTDQEGEGAWGYLSPATMKAIARWREAARIDKGPLFRRIETHFDGSIAAIGTKRLHPNSINLI |
| | YKRLVQRAFDKKLLGPMSEAEVARWVAAVSSHSLRVGVAQDNFAAREPLPAIMQAYRWRDPKTVLRYGAQ |
| | LAVKSGAAARMAARVNES |
| 1594 | SEM26217.1 |
| | MLSGMAENIEKSSSEAANVSSSNDDNERDRQDGEALSLPSSVAGSGALDRLVETARDYARAAASENTLKA |
| | YAKDWTHFARWCRMKGAEPLPPSPEMIGLYLADLASGSGPSSTLSVSTIDRRLSGLAWNYAQRGFTLDRK |
| | NRHIATVLAGIKRKHARPPAQKEAILAEDILAMVATLPYDLRGLRDRAILLIGYAGGLRRSEIVSLDVGK |
| | DNTPNSGGWIEILENGVILTLNAKTGWREVEIGRGSSEQTCPVHALEQWLHFAKIDFGPVFVRTSRDGKK |
| | ALEARLSDKHVARLIKRTVLDAGIRSDLPEKDRLALFSGHSLRAGLASSAEVDERYVQKQLGHASAEMTR |
| | RYQRRRDRFRVNLTKAAGL |
| 1595 | WP_106165551.1 |
| | MASETERSTSARSDELDDAPLDERDQRNSNYIALPSHVAASGALDRLVDTARNYARAAASDNTLKAYAKD |
| | WAHFARWCRMKGAEPLPPAPEMIGLYLADLASGSGPSPSRSASRSLSVSTIDRRLSGLGWNFAQRGFTLN |
| | RKNRHIATVLAGIKRKHARPPVQKAAILAEDILAMVATLPFDLRGLRDRAILLLGYAGGLRRSEIVSLDV |
| | HKDDTPDSSGWIEIMEKGALLTLNAKTGWREVEICRGSKDQTCPVHALEQWLRFAKIDFGPVFVGTSRDG |
| | KRALETRLNDKHVARLIKRTVLDAGIRSDLPDSERLALFSGHSLRAGLASSAEVDERYVQKQLGHASAEM |
| | TRRYQRSRDRFRVNLTKAAGL |
| 1596 | WP_008335838.1 |
| | MPSETEKSSSTPSDELNDARVDERAREESDDIALPSHVAGSGTLDRLVDTARDYARAAASDNTLKAYAKD |
| | WAHFTHWSRMKGAEPLPPSTEMVGLYLADLASGSGLSPALSVSTIDRRLSGLAWNYAQRGFTLDRKNRHI |
| | ATVLAGIKRKHARPPVQKEAILAEDILAMVATLPYDLRGLRDRAILLVGYAGGLRRSEIVSLDVHKDDTP |
| | GSGGWIEIFDKGALLTLNAKTGWREVEIGRGSKEQTCPVHALKQWLDFAKIDFGPVFVGTSRDGKRTSET |
| | RLNDKHVARLIKRTVLDAGIRSELPEQERMALFSGHSLRAGLASSAEVDERFVQKHLGHTSAEMTRRYQR |
| | RRDRFRVNLTKAAGL |
| 1597 | WP_029069676.1 |
| | MVNPMESHLTSTHTGPLAFPSEHDVLRLVDHSRSDNTHRTYDVGVRSWARFASTYSYQAFPADPAEVALW |
| | LSALFDEGKSTATAKTYLQSLRDHHRERGSSALNDIEGLRRVMQGIQRLNRERDARKARALSPTELMMLV |
| | GQSRMSGTLRGTRDTAWWLLCTSLGLRYSDAAILERRDIRFVEEKGAVVTLRFSKTDQFARGTDLALARA |
| | RFAHVDPVMALTDLLKALPEDPHTPVFQSVLKSNRWSGRSLTNTGLNKAIRRLADDTGINGERLTAHSAR |
| | VTFATNAYAAGIDESAIAITGRWKSLSVQRSYRRVDDESLFDKRSTASYWLEETLSR |
| 1598 | WP_011886969.1 |
| | MAGSIEKRGKNSYRLVYSMGFDANGKRIKRTKTVHVKTKKEAEKELAKFIAEIEAGEYIKPAKMSLSDFI |
| | QLWRDNYAEKQLSPKTFETYNNYINTRIIPQLGHLQLADIKPIHLIRFLNNLKKDETRLDGKKGSLSEAT |
| | INYYRRILKNIFNRAVEWKFLQVNPAEKLPKEKEDIGKGDVYDENETRLLLKCLEKEDLKWRLYFTLALT |
| | CGLRKGELLALQWEDIDLESGTLYVKHSLSYTKEKGFFLKEPKSKKSKREIAIPSFVLPLLKKYKNVRLR |
| | EKEKLQDEWEGGNYNFVFATWNGKPHHHSYPRTKWERFLKRNNLRYIRPHDLRHTSATIMLNNGVNYKTV |
| | SERLGHSSTRITFDFYVHRTKEADRSAAECFDNQFGA |
| 1599 | WP_047821448.1 |
| | MPLTDTRVRQLKHTGKPTGDKYTDSRSLHLLVKEAGKYWRMSYRFDGKQRTLALGVYPSVTLAKARQLRD |
| | QARQLLSEGVDPVEAKRRDKVAKESAAKHSFEAVARDLLKLRACSLAPSTIRKNTAWLEKNVFPEMGMMP |
| | ISKIEPRDVLFMLRKIEARGAIESTHKIRQLCGQVFRFAVASGLASRDVTFDLRDALPSVPEVHYAAITE |
| | PKQAAALMRSISNYSGHPYSRAALRLAPLFFVRPGVLRAAEWSEFDLDRGVWFIPATKMKIRQPHIVPLA |
| | RQAVGILRSMHQLTGHAKYVFPSIRAKDRCMSENTINAALRAMGYSKDMMTGHGFRAMARTILDEVLGER |
| | VDLIEHQLAHAVRDANGRAYNRTTHLPARIEMMQRWADYLDQIALPQATS |
| 1600 | WP_047825138.1 |
| | MPNFTPIDLGPSAPEEITSSPSGRAHVKMYRLADDAITEATTDIELAREFIAHGELSAKSIQNSQKELYR |
| | FLTWCREEARKTLVQLNVADLNAYKDFLKNPPPEWISRTKWPRSDPRYRPFTGPLSDPSRRQAMIAVKGL |
| | MGFAEQTGYLRRNPGALVRNVRAPSASRITRYLTQNAIALALQTVSARPADTPAAFRRRARDRFLLIAFA |
| | HTGARLNEIVSASMGSIYTEGNGRWWLDVLGKGNKPRRLPVPPDMLEAFQSYRQAFELLPQSSRTDRTPL |
| | VLSSRSRELARITDEAAAEAIKAVFADAARAADAQGDQDTAATLRQASAHWLRHSMLTNHANNGVQLKTL |
| | QDTAGHANIATTAAYLHKTDNERHDEIIRSANGNGIL |
| 1601 | WP_116546838.1 |
| | MALSQHQQALSQLQSFNALPLHLRSMATAHQQFTRYAEDSYSANTLRMVDFAEKHWAHWLAKQTDLPAEC |
| | WHEQQLLLYPIWPDILCRYIDELSESMSLNSVQTYINLLNFKNKKLGFPSLLQHTHVQWAMRRATNRALD |
| | AGEQIGQAQPFRLHDLELLLQIFADTDDPKLMRDLLLVWIAYESLLRESELVNIRCNDLLPGRQYSIRVR |
| | KTKTTKTLEDNEVLLSEPCSQWLHRYMTHFGLPLSSSGYLFRRLKKNGELFHSEENCKKLSGRTVDDIFR |
| | FFYWQIDPDARAELQNSIHAADASRYQTWTGHSARVGAAIDLFVYGASVHEIMRLGRWRNDQTVMRYIRR |
| | VSMQELPMNRMVTERLKR |
| 1602 | WP_086904734.1 |
| | MSKSIIHYSTGGSAPSRSSGIASNFTSSDKQIDTPFFEESSLPQSVHSDFFNAAAETEYE1SINTRRVYR |
| | TSFGLFEQYCATHQLQSLPADPRSIISFIGHQKELLQASSGTQLSKQTLTTRLAAIRYYHIQAGFPSPTE |
| | HPLVIRVMRGLSRNHHRQVQDYDQQPIMYDEVELLIQAIEQQPHPLLRSRDKAIIQLGLQGGFRRSELAN |
| | LKVQYLSFMRDKLKVRLPFSKSNQQGLREWKNLPDSEPFAAYNAVKDWLNESKITEGHLFRSISRDGKTL |
| | RPYQVSDNVTSKSSLIRNSGFLNGDDIYRIIKQYCLKAGLPAQYYGAHSLRSGCVTQLHENNKDTLYIMA |
| | RTGHTDPRSLRHYLKPKED |
| 1603 | WP_133181036.1 |
| | MSKSLNHYFAGDNTPTRISGMASTITPVYKQTDSPFFEESSLPQSVHSDFFNAAAETEYEISSNTRRVYR |
| | TSFGLFEQYCATHQLQSLPADPRSIISFIGHQKELLQASNGTQLSKQTLITRLAAVRYYHIQAGFPSPTE |
| | HPQVIRVMRGLSRNHHRQVQDYDQQPIMYDEVELLIQAIEQQPHPLLRTRDKAIIQLGLQGGFRRSELAN |
| | LKVQYLSFMRDKLKVRLPFSKSNQQGLREWKNLPESEPFAAYNAIKDWLHESKITEGHLFRSISRDGKSL |
| | RPYQVSDKVTSKSSLVRNSGFLNGDDIYRIIKQYCVKAGLPAQYYGAHSLRSGCVTQLHENNKDTFYIMA |
| | RTGHTDPRSLRHYLKPKED |
| 1604 | WP_109285990.1 |
| | MSKSIIHYSTGGSAPSRSSGIASNFTASDKKMDTPFFEESSLPQSVHSDFFNAAAETEYEISINTRRVYR |
| | TSFGLFEQYCVAHQLQSLPADPRSIISFIGHQKELLQASSGTQLSKQTLTTRLAAIRYYHIQAGFPSPTE |
| | HPLVIRVMRGLSRNHHRQVQDYDQQPIMYDEVELLIQAIEQQPHPLLRSRDKAIIQLGLQGGFRRSELAN |
| | LKVQYLSFMRDKLKVRLPFSKSNQQGLREWKNLPDSEPFAAYNAVKDWLKESQITDGHLFRSISRDGKTL |
| | RPYQISDKVTCKSSLVRNSGFLNGDDIYRIIKQYCVKAGLPSQYYGAHSLRSGCVTQLHENNKDTLYIMA |
| | RTGHTDPRSLRHYLKPKED |
| 1605 | WP_113940403.1 |
| | MSKMIRTNSNAQNNTNVTNERVTGSDHHNNNRAEQPRFFEETFLPQSVRSDYLSAAEETEYEISANTRRV |
| | YNTSFSLFSRYCAEHQLQALPADPRSVISFIGYQKELIQESTGVQLSKQTLTTRLAAIRYHHIQAGFHSP |
| | TEHPLVIRVMRGLSRNQSRHVSDYDQQPIMYDEVEMLIQAIDEQVQPLTRARDKAIIQLGLQGGFRRSEL |
| | ADIKVQYVSFLRNKLKVRLPYSKSNQQGQREWKDLPDHEPFAALNAVKNWLSLANIEDGHLFRSLSRDGK |
| | YLRPYQIVEHHSEANSSLHKNSGFLTGDDIYRIIKKYCTKAGLPAKFYGAHSLRSGCVTQLHENDKDHLY |
| | IMARTGHTDPRSLRHYLKPRD |
| 1606 | ACK46586.1 |
| | MSKMIRTNSNAQNNTNISNERVIGSGHHHNNRAEQPRFFEESFLPQSVRSDYLSAAEETEYEISVNTRRV |
| | YNTSFSVFSRYCAEHQLQALPADPRSVISFIGHQKELIQESTGVQLSKQTLTTRLAAIRYHHIQAGFHSP |
| | TEHPLVIRVMRGLSRNQSRHVSDYDQQPIMYDEVEMLIQAIDEQVQPLTRARDKAIIQLGLQGGFRRSEL |
| | ADIKVQYVSFLRNKLKVRLPYSKSNQQGQREWKDLPDHEPFAALDAVKNWLSLANIEDGHLFRSLSRDGK |
| | KLRPYQMKNRHSGSNSLLNKNSGFLTGDDIYRIIKKYCTKAGLPAKFYGAHSLRSGCVTQLHENNKDHLY |
| | IMARTGHTDPRSLRHYLKPRD |
| 1607 | AEG11408.1 |
| | MSKMIRTNSNAQNNANISNEIATGSGHHHNNRAEQPRFFEETFLPQSVRSDYLSAAEETEYEISVNTRRV |
| | YNTSFNVFSRYCAEHQLQALPADPRSVISFIGHQKELIQESTGVQLSKQTLTTRLAAIRYHHIQAGFHSP |
| | TEHPLVIRVMRGLSRNQSRHVSDYDQQPIMYDEVEMLIQAIDEQVQPLTRARDKAIIQLGLQGGFRRSEL |
| | ADIKVHYVSFLRNKLKVRLPYSKSNQQGQREWKDLPDHEPFAALDAVKNWLSLANIEDGHLFRSLSRDGK |
| | NLRPYQMKDRHSGSSSLLNKNSGFLTGDDIYRIIKKYCTKAGLPAKFYGAHSLRSGCVTQLHENNKDHLY |
| | IMARTGHTDPRSLRHYLKPRD |
| 1608 | WP_081248413.1 |
| | MSRMIRTNINAQNNTNISNERVIGSGHHHNNRAEQPRFFEESFLPQSVRSDYLSAAEETEYEISVNTRRV |
| | YNTSFSVFSRYCAEHQLQALPADPRSVISFIGHQRELIQESTGVQLSRQTLTTRLAAIRYHHIQAGFHSP |
| | TEHPLVIRVMRGLSRNQSRHVSDYDQQPIMYDEVEMLIQAIDEQVQPLTRARDRAIIQLGLQGGFRRSEL |
| | ADIRVQYVSFLRNRLRVRLPYSRSNQQGQREWRDLPDHEPFAALDAVRNWLSLANIEDGHLFRSLSRDGR |
| | NLRPYQMRDRHSGSSSLLNRNSGFLTGDDIYRIIRRYCTRAGLPARFYGAHSLRSGCVTQLHENNRDHLY |
| | IMSRTGHTDPRSLRHYLRPRD |
| 1609 | WP_012277158.1 |
| | MNSEQQCPRQVPSLNEQEHALGHFSGGLTNGHSTQHAPSQNPNERFFQEQQLPISILDDYRSAASETQYE |
| | ISDNTRRVYRSSFAIFRNYCDQHNLSALPADPRSVISFIGHQREIYQERSGHQLSRQTINTRLAAIRFFH |
| | IQAAHHSPTEHPLVIRVMRGLMRNQYRQISDYDQQPITYDELEMLLDVIERQPQQLTRLRDRAILQLGLQ |
| | GGFRRSELAEIRVEHISFLRERLRVRVPYSRSNQQGQREWRDLPRQELFSAYEAVQQWLDATRIRQGHLF |
| | RSLSRDGNSVRDYQITQARMGRGFLRGDDIYQMIRRYCDRAGLNSRFYGAHSLRSGCVTQLHENDRDHLY |
| | IMARTGHTDPRSLRHYLRPRD |
| 1610 | WP_012586824.1 |
| | MASYSIQRRERADGTVRHRCLVRVRRNGRILYTEQRTFTRYAAAEAWGRDRVIDIESNGFATEDTAPITL |
| | GSIISRALTDENIDSSIGRSRRFCLRLLSDCDIARLNLTDIRPHHIIDHCRLRRSAGTGPSTIAVDVSVI |
| | RWLLRIARSNFGHEVSQISVIEAYDALYSQDLIARSGRRSRRPTTDEIERLRVGLAARADQRAAHIPYID |
| | LLDFSILSCMRIGEVCRITWDDVDEAQRAVIVRDRRDPRRRAGNHMLVPLLGGAWEILQRQPRNDARVFP |
| | YNERSVTAGFQRVRNELGIEDLRYHDLRREGASRLFERGYSIDEVAQVTGHRNINTLWQVYTELFPRRLH |
| | DRDC |
| 1611 | WP_081729030.1 |
| | MTGSDHHNNNRAEQPHFFEETFLPQSVRSDYLSAAEETEYEISANTRRVYNTSFSLFSRYCAEHQLQALP |
| | ADPRSVISFIGHQKELIQESTGVQLSKQTLTTRLAAIRYHHIQAGFHSPTEHPLVIRVMRGLSRNQSRHV |
| | SDYDQQPIMYDEVELLIQAIDEQVQPLTRARDKAIIQLGLQGGFRRSELADIKVQYVSFLRNKLKVRLPY |
| | SKSNQQGQREWKDLPDHEPFAALSAVKNWLSLANIEDGHLFRSLSRDGKYLRPYQIVEHHSEANSSLHKN |
| | SGFLTGDDIYRIIKKYCTKAGLPAKFYGAHSLRSGCVTQLHENDKDHLYIMARTGHTDPRSLRHYLKPRD |
| 1612 | KZK70296.1 |
| | MIGSGHHHNNRAEQPRFFEESFLPQSVRSDYLSAAEETEYEISVNTRRVYNTSFSVFSRYCAEHQLQALP |
| | ADPRSVISFIGHQKELIQESTGVQLSKQTLTTRLAAIRYHHIQAGFHSPTEHPLVIRVMRGLSRNQSRHV |
| | SDYDQQPIMYDEVEMLIQAIDEQVQPLTRARDKAIIQLGLQGGFRRSELADIKVQYVSFLRNKLKVRLPY |
| | SKSNQQGQREWKDLPDHEPFAALDAVKNWLSLANIEDGHLFRSLSRDGKNLRPYQMKDRHSGSSSLLNKN |
| | SGFLTGDDIYRIIKKYCTKAGLPAKFYGAHSLRSGCVTQLHENNKDHLYIMSRTGHTDPRSLRHYLKPKD |
| 1613 | WP_012154534.1 |
| | MANSTKQLTATQVSNAKPKEKEYNLADGRGLSLRVKTGGSKFWLLNYTRPVTQKRANLGLGTYPDVPLAE |
| | ARKRREAARELLAQGIDPQHHQQQQKAAIKTDAENTLKSVTNAWFEIKKQKVSENHGQKLYRRLELYLFP |
| | ALGGTPISVLTAPQVIQVLKPAEAKGNIETCKRVISWLNEVMTFAVNTGLIHSNPLIGIAAAFGVPEKRQ |
| | MPTLKPAELPEFIEALTYSSIKKTTRCLIEIQLHTMTRPAEAAKAKWTEIDFDKQLWTIPAERMKMKREH |
| | IIPLTPQVISLLNRMHEISGDLEYIFPADRNKHHHTNTETANMAIKRMGYKGRLVAHGLRALASTTLNEQ |
| | GFDAELIEVSLAHVDKNTVRAAYNRADYIERRRELMCWWSEHVQITPNQLNSVITQQLLK |
| 1614 | ABV87414.1 |
| | MLDLTSLLQIKAKDLKMNSEQNFPEIEGFSQIEDSDLIENAPQEVAIVDGESALTRFNSGLAESRTSQFD |
| | HNEKFFKEQQLPISILDDYKSAAGETQYEISANTRRVYRSSFTIFKNYCDQHNLSPLPADPRSVISFIGH |
| | QKELYQEKNGHQLSKQTINTRLAAIRFFHIQAALHSPTEHPLVIRVMRGLMRNQYRHVSDYDQQPITYDE |
| | LEMLLAVIDQQPKELTRLRDKAILQLGLQGGFRRSELAEVRIEHISFLREKLKVRVPYSKSNQQGQREWK |
| | DLPKQELFSAYDAVQQWLDATKIKQGHLFRSLSRDGNSVREYQITQEKIGKGFLKGDDIYQMIKKYCDKA |
| | GLNSRFYGAHSLRSGCVTQLHENDKDHLYIMARTGHTDPRSLRHYLKPKD |
| 1615 | WP_011622713.1 |
| | MSKSIIHYSTGGNAPSRSSGIASNFTSSDKOMDTPFFEESSLPOSVHSDFFNAAAETEYEISINTRRVYR |
| | TSFGLFEQYCTAHQLQSLPADPRSIISFIGHQKELLQASSGTQLSKQTLTTRLAAIRYYHIQAGFPSPTE |
| | HPLVIRVMRGLSRNHHRQVQDYDQQPIMYDEVELLLQAIEQQPHPLLRSRDKAIIQLGLQGGFRRSELAN |
| | LKVQYLSFMRDKLKVRLPFSKSNQQGLREWKNLPDSEPFAAYNAVKDWLNESKITEGHLFRSISRDGKTL |
| | RPYQVSDNVTSKSSLIRNSGFLNGDDIYRIIKQYCLKAGLPAQYYGAHSLRSGCVTQLHENNRDTLYIMA |
| | RTGHTDPRSLRHYLKPKED |
| 1616 | WP_051714141.1 |
| | MSKTNRFYPIDVNQQSVGVNTHLTKKLTQADNAFFEESALPQSVHNDFYNAAAETEFEISSNTRRVYQTS |
| | FSLFAQYCLEHRLQSLPTDPRSVISFIGHQKELLMADTGMQLSKQTLTTRLAAIRYYHIQAGFPSPTEHP |
| | LVLRVMRGLSRNHNRRVQDYDQQPIMYDDVELLLQAVEQQPHPLLRSRDKAIIQLGLQGGFRRSELANLK |
| | VQYLSFMRDKLKVRLPFSKSNQQGLREWKNLPDSEPFAAYHAVKAWLHESQISDGHLFRSISRDGKTLRP |
| | YQVKDNNKSNTTFNRNSGFLNGDDIYRIIKQYCVKAGLPAQYYGAHSLRSGCVTQLHENNKDTLYIMART |
| | GHTDPRSLRHYLKPKED |
| 1617 | WP_077751411.1 |
| | MNKLSINQNHRQQVTGDKSFFEEQELPISIFDDFKSAASETEYEVAPNTRRVYRSSFNIFTQYCQHHGLN |
| | NLPADPRSVISFIGHQKEQVHKKTGAQFSKQTITTRLAAIRFYHIQAGFHSPTEHPLVIRVMRGLSRNKH |
| | RVITDYDQQPIMYDELELLLQTIDKQGQELTKARDKAIIQLGFQGGFRRSELAEIQVKHINFLRNKLKVR |
| | LPYSKSNQQGHREWKDLPGSELFSAFGAVKHWLDVSQLSQGHLFRSLSRDGQSLRPYSVVNQANLNTDEN |
| | PPQLNRGFLRGDDIYQMIKKYCSKAGLSPEFYGAHSLRSGCVTQLHENDKDHLYIMARTGHTDPRSLRHY |
| | LKPKD |
| 1618 | WP_013051410.1 |
| | MNKLSINQFNRPAITSDKSFFQEQELPISILDDFKSAASETEYEVADNTRRVYRSSFNIFTEYCQHHGLN |
| | HLPADPRSVISFIGHQKEQVHHRTGMQFSKQTITTRLAAIRFYHIQAGFHSPSEHPLVIRVMRGLSRNKH |
| | RLTSDYDQQPIMYEELELLLQTIDKQEQELTRARDKAIIQLGFQGGFRRSELAEIQVNHVNFLRNKLKVR |
| | LAYSKSNQQGHKEWKDLPESEQFSAFSAVRHWLEVSQLTQGHLFRSLTRDGQRLRPYSVASRVNLNSHDN |
| | LPQVNRGFLRGDDIYQMIKKYCRKAGLSPEFYGAHSLRSGCVTQLHENDKDHLYIMARTGHTDPRSLRHY |
| | LKPKD |
| 1619 | WP_115334556.1 |
| | MSKMIRTNSNAQNNANISNERATGSDHHHNNRVEQPRFFEETFLPQSVRSDYLSAAEETEYEISVNTRRV |
| | YNTSFNVFSRYCAEHQLQALPADPRSVISFIGHQKELIQESTGVQLSKQTLTTRLAAIRYHHIQAGFHSP |
| | TEHPLVIRVMRGLSRNQSRHVSDYDQQPIMYDEVEMLIQAIDEQVQPLTRARDKAIIQLGLQGGFRRSEL |
| | ADIKVQYVSFLRNKLKVRLPYSKSNQQGQREWKDLPDHEPFAALDAVKNWLSLANIEDGHLFRSLSRDGK |
| | NLRPYQMKDRHCGSSSLLNKNSGFLTGDDIYRIIKKYCTKAGLPAKFYGAHSLRSGCVTQLHENNKDHLY |
| | IMARTGHTDPRSLRHYLKPKD |
| 1620 | WP_126491884.1 |
| | MSKMIRTNSNAQNNANISNERVKESDHHHNNRAEQPRFFEESFLPQSVRSDYLSAAEETEYEISVNTRRV |
| | YNTSFSVFSRYCAEHQLQALPADPRSVISFIGHQKELIQESTGVQLSKQTLTTRLAAIRYHHIQAGFHSP |
| | TEHPLVIRVMRGLSRNQSRHVSDYDQQPIMYDEVEMLIQAIDEQMQPLTRARDKAIIQLGLQGGFRRSEL |
| | ADIKVQYVSFLRNKLKVRLPYSKSNQQGQREWKDLPDHEPFAALDAVKNWLSLANIEDGHLFRSLSRDGK |
| | NLRPYQMKDRHSGSSSLLNKNSGFLTGDDIYRIIKKYCTKAGLPAKFYGAHSLRSGCVTQLHENNKDHLY |
| | IMARTGHTDPRSLRHYLKPKD |
| 1621 | WP_020912617.1 |
| | MSRKHISPISNKVSSTSSNNDFYQEAELPISMLNDFESAAKETRYEISNNTRRVYRSSFGIFKAYCDAHG |
| | RSSIPADPRTVISFIGHQKDFYQAKSGHQLSTQTINSRLAAIRFYHIQSGTPSPTEHPLVTRVMRGLMRN |
| | HTRIVSDYDQQPIMYEELEILIQAIENQSQPLTQKRDKAIILLGFQGGFRRSELANIKVNHLSFLRDKLK |
| | VRLPYSKSNQQGQREWKVLPKGETFSAYEPIKDWLNAAKIKEGHLFRSLTRDGRYIRDYQVLDANSGKGF |
| | LRGDDIYQLIKRYCNKADLDPKFYGAHSLRSGCVTQLHENNKDHLYIMGRTGHTDPRSLNHYLKPND |
| 1622 | WP_088211152.1 |
| | MSKSIIHYSTGGSAPSRSSGITSNITSSDKQMDPPFFEESSLPQSVHSDFFNAAAETEYEISINTRRVYR |
| | TSFGLFEQYCATHQLQSLPADPRSIISFIGHQKELLQASNGTQLSKQTLTTRLAAIRYYHIQAGFPSPTE |
| | HPLVIRVMRGLSRNHHRQVQDYDQQPIMYDEVELLIQAIEQQPHPLLRLRDKAIIQLGLQGGFRRSELAN |
| | LKVQYLSFMRDKLKVRLPFSKSNQQGLREWKNLPDSEPFAAYNAVKDWLHESKITEGHLFRSISRDGKTL |
| | RPYQVSDKVTSKSSLVRNSGFLNGDDIYRIIKQYCLKAGLPAQYYGAHSLRSGCVTQLHENNKDTLYIMA |
| | RTGHTDPRSLRHYLKPKED |
| 1623 | WP_011626197.1 |
| | MSKSIIHYSTGGSAPSRSSGIASNITASDKKMDTPFFEESSLPQSVHSDFFNAAAETEYEISINTRRVYR |
| | TSFGLFEQYCATHQLQSLPADPRSIISFIGHQKELLQASSGTQLSKQTLTTRLAAIRYYHIQAGFPSPTE |
| | HPLVIRVMRGLSRNHHRQVQDYDQQPIMYDEVELLIQAIEQQPHPLLRLRDKAIIQLGLQGGFRRSELAN |
| | LKVQYLSFMRDKLKVRLPFSKSNQQGLREWKNLPDSEPFAAYNAVKDWLKESQITDGHLFRSISRDGKTL |
| | RPYQISDNVTCKSSLVRNSGFLNGDDIYRIIKQYCVKAGLPSQYYGAHSLRSGCVTQLHENNKDTLYIMA |
| | RTGHTDPRSLRHYLKPKED |
| 1624 | WP_011072365.1 |
| | MSKSIQIYTADDSHSHQAVGISANLTKPFTQGDKTFFEESSLPQSVHADFYNAASETEYEISNNTRRVYR |
| | ISFSFFEQYCLEHNLQSLPADPRSIISFIGHQKELLQASTGMQLSKQTLTTRIAAIRFYHIQAGFPTPTE |
| | HPQVIRVMRGLSRNHHRLVQDYDQQPIMYDEVELLIQAVDQQPHPLLRLRDKAIIQLGLQGGFRRSELAN |
| | LKVHYLSFMRDKLKVRLPFSKSNQQGLREWKSLPDSEPFAAYHAVKSWLNESQITDGHLFRSISRDGKTL |
| | RPYHVNDNSKPKSTFSRNSGFLNGDDIYRIIKQYCLKAGLPAQYYGAHSLRSGCVTQLHENNKDILYIMA |
| | RTGHTDPRSLRHYLKPKED |
| 1625 | WP_069455445.1 |
| | MSKTNRFYPIDVNQQPVGVNTHLTKNLTQAGNAFFEESALPQSVHNDFYNAAAETEFEISSNTRRVYQTS |
| | FSLFAQYCLEHRLQSLPTDPRSVISFIGHQKELLMADTGMQLSKQTLTTRLAAIRYYHIQAGFPSPTEHP |
| | LVLRVMRGLSRNHNRRVQDYDQQPIMYDEVELLLQAVEQQPHPLLRSRDKAIIQLGLQGGFRRSELANLK |
| | VQYLSFMRDKLKVRLPFSKSNQQGLREWKNLPDSEPFAAYHAVKAWLHESQISDGHLFRSISRDGKTLRP |
| | YQVKDNNKSNTTFNRNSGFLNGDDIYRIIKQYCVKAGLPAQYYGAHSLRSGCVTQLHENNKDTLYIMART |
| | GHTDPRSLRHYLKPKED |
| 1626 | WP_050991348.1 |
| | MSKTNRFYPIDVNQQPVGVNTHLTKKLTQADNAFFEESALPQSVHNDFYNAAAETEFEISSNTRRVYQTS |
| | FSLFAQYCLEHRLQSLPTDPRSVISFIGHQKELLMADTGMQLSKQTLTTRLAAIRYYHIQAGFPSPTEHP |
| | LVLRVMRGLSRNHNRRVQDYDQQPIMYDEVELLLQAVEQQPHPLLRSRDKAIIQLGLQGGFRRSELANLK |
| | VQYLSFMRDKLKVRLPFSKSNQQGLREWKNLPDSEPFAAYHAVKAWLNESQISDGHLFRSISRDGKTLRP |
| | YQVKDNNKSNTTFNRNSGFLNGDDIYRIIKQYCVKAGLPAQYYGAHSLRSGCVTQLHENNKDTLYIMART |
| | GHTDPRSLRHYLKPKED |
| 1627 | WP_055647363.1 |
| | MSKTNRFYPIDVNQQPVGVNTHLTKKLTQADNAFFEESALPQSVHNDFYNAAAETEFEISSNTRRVYQTS |
| | FSLFAQYCLEHRLQSLPTDPRSVISFIGHQKELLMADTGMQLSKQTLTTRLAAIRYYHIQAGFPSPTEHP |
| | LVLRVMRGLSRNHNRRVQDYDQQPIMYDEVELLLQAVEQQPHPLLRSRDKAIIQLGLQGGFRRSELANLK |
| | VQYLSFMRDKLKVRLPFSKSNQQGLREWKNLPDSEPFAAYHAVKAWLHESQISDGHLFRSISRDGKTLRP |
| | YQVKDNNKSNTTFNRNSGFLNGDDIYRIIKQYCVKAGLPAQYYGAHSLRSGCVTQLHENNKDTLYIMART |
| | GHTDPRSLRHYLKPKED |
| 1628 | WP_112352796.1 |
| | MNKLSINQYHPRQVTSDKSFFEETELPISILDDFKSAASETEYELAPNTRRVYRASFNIFTQYCQHHGLS |
| | NLPADPRAVISFIGHQKEQVQQKTGMQFSKQTITTRLAAIRFYHIQAGFHSPTEHPLVIRVMRGLSRNKH |
| | RLTKDYDQQPIMYDELELLLQTIDKQGQELTRARDKAIIQLGFQGGFRRSELADIQVNHINFMRKKLKVR |
| | LAYSKSNQQGHKEWKDLPESELFSAFSAVKHWLQVSQLTQGHLFRSLSRDGQRLRPYSVANKSSVDSYAN |
| | PPQVNRGFLRGDDIYQMIKKYCAKAGLSPEFYGAHSLRSGCVTQLHENDKDHLYIMARTGHTDPRSLRHY |
| | LKPKD |
| 1629 | WP_105252541.1 |
| | MSKMIRTNSNAQNNTNVTNERVTGSDHHNNNRAEQPRFFEETFLPQSVRSDYLSAAEETEYEISANTRRV |
| | YNTSFSLFSRYCAEHQLQALPADPRSVISFIGHQKELIQESTGVQLSKQTLTTRLAAIRYHHIQAGFHSP |
| | TEHPLVIRVMRGLSRNQSRHVSDYDQQPIMYDEVEMLIQAIDEQVQPLTRARDKAIIQLGLQGGFRRSEL |
| | ADIKVQYVSFLRNKLKVRLPYSKSNQQGQREWKDLPDHEPFAALNAVKNWLSLANIEDGHLFRSLSRDGK |
| | YLRPYQIVEHHSEANSSLHKNSGFLTGDDIYRIIKKYCTKAGLPAKFYGAHSLRSGCVTQLHENDKDHLY |
| | IMARTGHTDPRSLRHYLKPRD |
| 1630 | WP_012089273.1 |
| | MSKMIRTNSNAQNNANISNERATGSDHHHNNRAEQPRFFEESFLPQSVRSDYLSAAEETEYEISVNTRRV |
| | YNTSFSVFSRYCAEHQLQALPADPRSVISFIGHQKELIQESTGVQLSKQTLTTRLAAIRYHHIQAGFHSP |
| | TEHPLVIRVMRGLSRNQSRHVSDYDQQPIMYDEVEMLIQAIDEQVQPLTRARDKAIIQLGLQGGFRRSEL |
| | ADIKVQYVSFLRNKLKVRLPYSKSNQQGQREWKDLPDHEPFAALDVVKNWLSLANIEDGHLFRSLSRDGK |
| | NLRPYQMKDRHCGSSSLLNKNSGFLTGDDIYRIIKKYCTKAGLPAKFYGAHSLRSGCVTQLHENNKDHLY |
| | IMARTGHTDPRSLRHYLKPKD |
| 1631 | WP_071939473.1 |
| | MSKMIRTNSNAQNNTNVSNERANESGHHHNNRAEQTRFFEETFLPQSVRSDYLSAAEETEYEISVNTRRV |
| | YNTSFSVFSRYCAEHQLQALPADPRSVISFIGHQKELIQESTGVQLSKQTLTTRLAAIRYHHIQAGFHSP |
| | TEHPLVIRVMRGLSRNQSRHVSDYDQQPIMYDEVEMLIQAIDEQVQPLTRARDKAIIQLGLQGGFRRSEL |
| | ADIKVQYVSFLRNKLKVRLPYSKSNQQGQREWKDLPDHEPFAALDAVKNWLSLANIEDGHLFRSLSRDGK |
| | NLRPYQMKDRHSGSSSLLNKNSGFLTGDDIYRIIKKYCTKAGLPAKFYGAHSLRSGCVTQLHENNKDHLY |
| | IMARTGHTDPRSLRHYLKPKD |
| 1632 | WP_014358005.1 |
| | MSKMIRTNSNAQNNTNISNERATGSGHHHNNRAEQPRFFEETFLPQSVRNDYLSAAEETEYEISVNTRRV |
| | YNTSFSVFSRYCAEHQLQALPADPRSVISFIGHQKELIQESTGVQLSKQTLTTRLAAIRYHHIQAGFHSP |
| | TEHPLVIRVMRGLSRNQSRHVSDYDQQPIMYDEVEMLIQAIDEQVQPLTRARDKAIIQLGLQGGFRRSEL |
| | ADIKVQYVSFLRNKLKVRLPYSKSNQQGQREWKDLPDHEPFAALDAVKNWLSLANIEDGHLFRSLSRDGK |
| | NLRPYQMKDRHSGSSSLLNKNSGFLTGDDIYRIIKKYCTKAGLPAKFYGAHSLRSGCVTQLHENNKDHLY |
| | IMARTGHTDPRSLRHYLKPKD |
| 1633 | WP_106650561.1 |
| | MSKIIRTNTNAQNNTYMSNERATESEHHQNNRAEQPRFFEESFLPQSVRSDYLSAAEETEYEISVNTRRV |
| | YNTSFSVFSRYCAEHQLQVLPADPRSVISFIGHQKELIQESTGVQLSKQTLTTRLAAIRYHHIQAGFHSP |
| | TEHPLVIRVMRGLSRNQSRYVSDYDQQPIMYDEVEMLIQAIDEQEQPLTRARDKAIIQLGLQGGFRRSEL |
| | ADIKVQYVSFLRNKLKVRLPYSKSNQQGLREWKDLPDHEPFAALDAVKNWLSLANIEDGHLFRSLSRDGK |
| | NLRPYQMKDRHSGASSLLNKNSGFLTGDDIYRIIKKYCTKAGLPARFYGAHSLRSGCVTQLHENNKDHLY |
| | IMARTGHTDPRSLRHYLKPKD |
| 1634 | WP_076411519.1 |
| | MSKLTQHLPNSFVSNNGHQQKLTEDNLFFEEQALPISILDDFKSAASETQYEISYNTRRAYQTSFNIFSR |
| | YCEQHGLNTLPADPRSVISFIGQQKELINQKTGAQLSKQTLTTRLAAIRFFHIQAGFHSPTEHPLVLRVM |
| | RGLSRNQLRVTSDYDQQPILYDELELLIQTIDNQKQTLTKARDKAIIQLGFQGGFRRSELASIQVSHVNF |
| | LRNKLKVRLAYSKSNQQGHKEWKDLPEAEPFSAMSAVKLWLDESQIKQGHLFRSLSRDGESLRPYFQAKS |
| | DLDQDAGVQKNSGFLRGDDIYQIIRKYCHKAGLSSDLYGAHSLRSGCVTQLHENDKDHLYIMGRTGHTDP |
| | RSLRHYLKPKD |
| 1635 | WP_012325003.1 |
| | MNKMTPFQTGSLLSRPANTEEKQFYEERELPLSILDDYKSAASETEYEISANTRRAYTSSFSLFSNYCSE |
| | HRLNTLPADPRTVISFIGYQKELIQSRSGAQLSRQTLTSRLAAIRYFHIQAGYHSPTEHPLVIRVMRGLS |
| | RNKQRTVSDYDQQPIMYDELEMLLNVIELQPHAITRARDKAIIQLGFQGGFRRSELADIRVNHLSFLRDK |
| | LKVRLPYSKSNQQGQREWKNLPQSEPFAAFDAVKHWLTVSKIQDGHLFRSLTRDGRQVRDYSVATQGIES |
| | KKRNSGFLRGDDIYQMIRKYCTKAGLSHEFYGAHSLRSGCVTQLHENDKDHLYIMARTGHTDPRSLKHYL |
| | KPKD |
| 1636 | WP_101090209.1 |
| | MSGKRISPISNKALKTVSDDGFYQEHELPLSILNDFESAAKETRYEISHNTRRVYQSSFGIFVTYCESHG |
| | LSSLPADPRSVISFIGHQKDIYQANSGHQLSTQTINSRLAAIRFFHIQSGSPSPTEHPLVIRVMRGLMRN |
| | QNRTVADYDQQPIMYDELELLIQTIDERNQNLTKKRDKAILQLGFQGGFRRSELANIKVNHLSFLRDKLK |
| | VRLPYSKSNQQGQREWKVLPKEEPFSAFDAVKEWLSAAEIKEGHLFRSLTRDGNQIRDYQITDTNLGKGF |
| | LRGDDIYQLIKRYCNKAGLDPQYYGAHSLRSGCVTQLHENKKDHLYIMGRTGHTDPRSLNHYLKPNE |
| 1637 | WP_115136967.1 |
| | MNNQVPEQYHQESNLPSSILDDFHNAAAETEFEVSANTRRNYATSFSIFQDYCQHHGMSALPADPRAVIS |
| | FIGHQKDLYLESGVQLSKATLISRLAAIRFYHLQAGFRTPTDHPMLLRIMRGISRNQYRQQAHYDQQPIM |
| | YTELSRLLSAVDSQQSALLKMRDKALITLGFQGGFRRSELASLQTQHLTFLHDRLRVRLAFSKSNQQGGK |
| | EWKDLPYSEQFAAADYVRRWLEISQLSSGHLFRSISRCGKFTRPYERKMPGSSGRNSGFLNGDDVYRTVR |
| | KYCKIAGLGESWFGAHSLRSGCVTQLHENDKDTLYIMGRTGHTDPRSLRHYLKPK |
| 1638 | WP_064791349.1 |
| | MNKMTPFQTGSLLSRPANTEEKQFYEERELPLSILDDYKSAASETEYEISANTRRAYTSSFSLFSNYCSE |
| | HRLNTLPADPRTVISFIGYQKELIQSRSGAQLSRQTLTSRLAAIRYFHIQAGYHSPTEHPLVIRVMRGLS |
| | RNKQRTVSDYDQQPIMYDELEMLLNVIEQQPHAITRARDKAIIQLGFQGGFRRSELADIRVNHLSFLRDK |
| | LKVRLPYSKSNQQGQREWKNLPQSEPFAAFDAVKHWLTVSKIQDGHLFRSLTRDGRQVRDYSVATQGIES |
| | KKRNSGFLRGDDIYQMIRKYCTKAGLSHEFYGAHSLRSGCVTQLHENDKDHLYIMARTGHTDPRSLKHYL |
| | KPKD |
| 1639 | WP_012142588.1 |
| | MSKSACHTINSILTPNTSIVPSGTNGNSNASDEKFFEETQLPLSILDDYKSAASETEYEISENTRRVYTS |
| | SYAIFNRYCLEHGLSPLPADPRSVISFIGHQKESIQQSSGAQLSRQTLTSRLAAIRYHHIQAGFHSPTEH |
| | PLVIRVMRGLSRNKYRKVADYDQQPIMYDELEMLIDVINQQPQPMTRARDKAIIQLGFQGGFRRSELADI |
| | QVNHLSFLRNKLKVRLPYSKSNQQGQREWKDLPQTEPFAAFDAVKEWIEVSKIKQGHLFRSISRDGSQIR |
| | PYSVSDTTNRKINQTSMDNEELPLSRSNRNCGFLRGDDIYQMIKKYCARSGLSPEFYGAHSLRSGCVTQL |
| | HENDKDHLYIMARTGHTDPRSLRHYLKPKD |
| 1640 | WP_126520563.1 |
| | MVPSGTNGNRNASDEQFFEETQLPLSILDDYKSAASETEYEISENTRRVYTSSYAIFNRYCLEHGLSPLP |
| | ADPRSVISFIGHQKESIQQSSGAQLSRQTLTSRLAAIRYHHIQAGFHSPTEHPLVIRVMRGLSRNKYRKV |
| | ADYDQQPIMYDELEMLIDVINQQPQPMTRARDKAIIQLGFQGGFRRSELADIQVNHLSFLRNKLKVRLPY |
| | SKSNQQGQREWKDLPQTEPFAAFDAVKEWIEVSKIKQGHLFRSISRDGSQIRPYSVSDITNRKINQTSMD |
| | AKEHSLPRLNRNSGFLRGDDIYQMIKKYCARSGLSPEFYGAHSLRSGCVTQLHENDKDHLYIMARTGHTD |
| | PRSLRHYLKPKD |
| 1641 | WP_108946565.1 |
| | MKGQIQFNQALVSQQHVDNDSSEKFFQEQQLPISILDDFKSAASETQYEISANTRRVYQSSFAIFKSYCE |
| | LHNLSALPADPRSVISFIGHQKEVYQEKSGHQLSKQTINTRLAAIRFFHIQAAHHSPTEHPLVIRVMRGL |
| | MRNQYRHTSDYDQQPITYDELEMLLAVIDQQPQQLTRLRDKAILQLGLQGGFRRSELAEVKIEHISFLRD |
| | KLKVRVPYSKSNQQGQREWKDLPKHEDFSAYDAVQHWLDATKLKQGHLFRSLSRDGNSIRDYQITQGKNG |
| | KGFLKGDDIYQMIKKYCDKAGLNSRFFGAHSLRSGCVTQLHENDKDHLYIMARTGHTDPRSLRHYLKPKD |
| | GYS |
| 1642 | WP_037411215.1 |
| | MKGQIQFNQALVSQQQVDSDSSEKFFQEQQLPISILDDFKSAASETQYEISANTRRVYQSSFAIFKSYCE |
| | LHNLSALPADPRSVISFIGHQKEVYQEKSGHQLSKQTINTRLAAIRFFHIQAAHHSPTEHPLVIRVMRGL |
| | MRNQYRHTSDYDQQPITYDELEMLLAVIDQQPQQLTRLRDKAILQLGLQGGFRRSELAEVKIEHISFLRD |
| | KLKVRVPYSKSNQQGQREWKDLPKHEDFSAYDAVQHWLDATKLKQGHLFRSLSRDGNSIRDYQITQGKNG |
| | KGFLKGDDIYQMIKKYCDKAGLNSRFFGAHSLRSGCVTQLHENDKDHLYIMARTGHTDPRSLRHYLKPKD |
| 1643 | 01040422.1 |
| | MDKYISRFTNYLKVEKNYSGHTVKNYLVDLKAFKGFAQDTDIAKIDHLFLRRYLASMRSSGYSKRTIARK |
| | LATLRSFFRFLCTDGYLKDNPISGISTPKLDKKLPIFLDVDTVFRLLESPGRDISGLRDRAIMETLYSTG |
| | IRVSELAGLKMENVDFIGEVIKVFGKGRKERMIPIGNKAVNSIRAYMDERGRLGIDRKELFLNKSKRPLS |
| | IRGIRRVIDKHIKNTSAKEHVSPHTLRHSFATHLLDRGADLRSIQELLGHMNLSTTQIYTHVTTERLKSV |
| | YDKTHPRA |
| 1644 | WP_047914882.1 |
| | MNIEKIARKGKPTVEKRTKQDGSISYRYTGYYLGIDEVTRKKVNATITGQTLKELDRNMIKARLDFERNG |
| | HTKKEQLQITLFSELAEEWFVSYKLITSSENTNNRVRGYLDTYIIPRFGDYLPDKIKPIDVQKWVNECAA |
| | KARQVAAEGRRAKKGEAKDFGAALYKLRDIFDYGITNFGLKKNPATTVQVPPKPKENKVKVKVLHDDELK |
| | IWLKHLSSLPNNQANRRFKLICETLLASGIRINELLALTIDDLNFETSELDINKTLMWKAADKKTGIKGK |
| | VICKPSPKSDAGCRKVDVPPKILERLKAWHDEVSERFEKIGLDKPSLIFPTVYGAYMCDRNERTTLKKQL |
| | TACGLPLYGFHIFRHTHASLLLNAGTNWKELQVRMGHKSIATTMDLYAELAPKKKAEAVNIYLDKIDELT |
| | A |
| 1645 | WP_010729268.1 |
| | MPTKLSNGKYKTNLRYPKRFKEITGIASEKYQKTFPNRQLAIKAENDMKKKIEKVLREENANSLELKGKI |
| | TFKKFYESKWLPRYELGQTIRSNRPPSDITISNTKDIFRLHILPMFGEYAMNYLNINTEIISDELTKKSK |
| | EYANIKIIKGYVRSMFDIAEILNYIEFNRTTKIIQSITAPKKNALEEKRIQEGKQALSSKELTNWIEAVN |
| | DDFNNHLLTFHDYTLFMITLYLGDRKSETYALQWKYIDFEKQTVRLKHTLDKYQRKKFTKGRKDTVIQVP |
| | EVVMTLLSEWKSVQADQLLKLKIKQTLDQYLFTYTKPSGEVNCPVHADYLNYRINSIKRRHPDLVHLSPH |
| | KLRHTYATIARQGGADMNQISNALTHSDISTTKIYVNTPDIVDKAVFEAFQRGLNKCD |
| 1646 | WP_003171984.1 |
| | MRSEDIPLFLKTSYQYNYIYYIFFKALLNTGMRKGEAAALQWKDINLKEHTIIISKTLDFTAKTKEELFG |
| | dtktftskrtimipkslvdellahkkwqnanklvlqdayeheldlvfsrvdgkflpkstlfnafsrilkk |
| | ANLPRLEIHSLRHTHAVLLLESGASMKYIQDRLGHKSIEITSNVYSHISDKINKDSISGFEAYMNNVLG |
| 1647 | WP_033660184.1 |
| | MRSEDIPLFLKTSYQYNYIYYIFFKALLNTGMRKGEAATLQWKDINLKEHTITISKTLDFTAKTKEELFG |
| | dtktftskrtimipktlvdellahkkwqnanklvlqdayeheldlvfsrvdgnflpkstlfnafsrilkk |
| | ANLPRLEIHSLRHTHAVLLLESGASMKYIQDRLGHKSIEITANVYSHISDKINKDSISGFEAYMNNVLG |
| 1648 | WP_002076880.1 |
| | MCSSYQRAPDLVKTSYQYNYIYYIFFKALLNTGMRKGEAAALQWKDINLKEHTITISKTLDFTAKTKEEL |
| | FGDTKTFTSKRTIMIPKSLVDELLEHKKWQNANKLVLQDAYEHELDLVFSRVDGNFLPKSTLFNAFSRIL |
| | KKANLPRLEIHSLRHTHAVLLLESGASMKYIQDRLGHKSIEITANVYSHISDKINKDSISGFEAYMNNVL |
| | G |
| 1649 | WP_016115818.1 |
| | MASFRKYQTKDGAKWLYKIYTTIDPKTGKKKQTTKRGFKTKKEAQLHAAKAETELSNGTFIEDKNVMIST |
| | FLNDWLITYKKGKVRNHTYNLHKTAINKHIVPFFGSYKVFDITPSLCQKFVNHLLEEGYSENSVKNYTAP |
| | LKGALLKAVDLQLIQQTPFRGIVIAKSDTEDKKIKHLEGQEVNTFVQKLKDTEPHYFSLFFTLLHTGIRK |
| | GEALALRWDDIDLEEGTISIRHTFTYDYKNLDNLFAKPKTKASYRTIILADFLIQILKNHKLEQNKCKLK |
| | LGGLYHDLSLVFARENGLPYPKSTLQRAMTRILKKANVTNITIHGLRHTHAVLLLDAGYSMKEVQERLGH |
| | DSIQITSDIYAHISKEMNKKSLNKYEAFAKRNLL |
| 1650 | WP_011736163.1 |
| | MPKRIAPLSDLQVRNAKPKEKQVTLFDGGGLYLLITPTGGKLWRLKYSLFGKEKLLALGTYPEISLADAR |
| | QRREDARKQVANGIDPGEVKKAQKVSSGEGDENSFEVIAREWHGKFLLNKSESYRDKMLSNFERDVFPWI |
| | GRVAVKNLKAPELLSALRRIEGRGALETAHRTRSACSQVLRYAVATGRAERDCASDLIGALPPYKKGHRA |
| | ALTDPKEVAPLLRAIDDYQGTFPVKCALKLAPLLFVRPGELRKAEWSEVDFKATEWRIPGDKMKMKNDHI |
| | VPLASQAVEILKELYPLTGHSKFLFPSPRSPLRPMSDNAILSALRRMGFEKDEMSGHGFRAMARTILDEV |
| | LHVRPDFIEHQLAHAVRDPNGRAYNRTAHLAERKKMMQAWADYLDDLKTRNGI |
| 1651 | WP_044402340.1 |
| | MAKVTVRKETGKLVMDFTYCNVRCREQTALPDTLQNRKRVEAVLEKIKKALKNGTFQYRDYFPESALASR |
| | FDQATTVDAGKAMQSPVNSPSPLFQDFATQWFKEHEIEWRRSHIRSLRSTLDGRLIPHFGQKVVSSITKS |
| | DILAYRATLAKVKGRGDKEGLSPKRINEIIGTLCQIIDEAADRFEFTTPTTNIKRLRVRKVDVDPFSLQD |
| | VQSILATVRADYRNYFTVRFFTGMRTGEVHGLKWRYVDFERRLIRVRETVVLGEDEYTKTDGSQRDIQMS |
| | QPVVEALTKQYEVTGKLSDYVFCNLMGAPLDNKNFTDRVWYPLLRHLGLTERRPYQMRHTAATLWLASGE |
| | APEWIARQLGHTSTEMLFRVYSRYVPNLTRQDGSAMERLLASRLATGKVLRMDRAHLQQVGDSNLFAEAG |
| | GSERATMPVPKPRGVAVGALERARTNWSRTSQDITLPERHAGEDPQPPPPGAMRTHVRRLNPLHA |
| 1652 | WP_008400148.1 |
| | MAKGSVRKKGKKWYYRFYVEDASGNLVQKECVGTESKSETEKLLRQAMDDYEKKKFVAKAENLTVGQLLD |
| | VWAEEELKTGTLSNGTVENYLGTIRNIKKHPLAERKLKNVTSEHLQSFFDLLSFGGVHPDGKERKGYSKD |
| | YIHSFSAVMQQSFRFAVFPKQYITFNPMQYIKLRYQTDEVDLFSDEDMDGNIQPISREDYERLLAYLQKK |
| | NPAAILPIQIAYYAGLRIGEACGLAWQDVNLEEQCLTIRRSIRYDGSKRKYIIGPTKRKKVRIVDFGDTL |
| | VEIFRNARKEQLKNRMQYGELYHTNYYKEVKEKNRVYYEYYCLDRTEEVPADYKEISFVCLRPDGCLELP |
| | TTLGTVCRKVAKTLEGFEGFHFHQLRHTYTSNLLANGAAPKDVQELLGHSDVSTTMNVYAHSTRDAKRKS |
| | VRLLDKVVGND |
| 1653 | WP_056871537.1 |
| | MSAYINSKISNWEMFMLHQQSLGKPTTLNIAIGYFKGNAEVTLFGFWEEQLRLWEYEKKPATIKSYKSTL |
| | NILRHFNNKLNFGDLTYDCIQKFDLYLRKERNNATNGCFVKHKCLKHMIKESISKGFMDKSPYEHFKVRS |
| | TKGTRMFLTIDEVNAIDDLQISKDNTFLQKSKDLFLFSCFTGLRYSDVVNLTWGNIKQNPDRIEIKIIKT |
| | EKPLLVPLISKAKDILNKYSKLTIKTDSLKALPQQANQVVNRNLKEIMMLAGIKKSISFHCARHSFASNL |
| | VEMNTPILYVKDLLGHQKIEQTMIYAKSIVGNLFDSMNNLNEKYHHVNKHVG |
| 1654 | WP_002990881.1 |
| | MSTKIWQNTLQSYIHYLKLERGLAENSIESYELDLLKFVQFLSHSEIEVAPKNVTPAHVNEFVYQLSTVL |
| | APTSQARIISGLKSFFTFLLVDGQIEKAPTDLLEIPKLGRKLPEVLAMEEIDALLATLDLSTNEGYRNKV |
| | MLELLYSCGLRVSELVNLRLSDLFFEEGFIRVIGKGSKHRFVPIDPDTMELIIMYKQSIRNHMQVKKEDT |
| | DIVFLNRRGGRLTRAMIFTIVKQAAQEANIQKNVSPHSFRHSFATYLLENGADIRMIQLMLGHESILTTE |
| | IYTHISREKLKGVMDRYHPRSRQ |
| 1655 | WP_041890631.1 |
| | MNITLKQRKLPSGRISLLIEYTKGVEVTSTGKKKYIREFENLKLFLHGAPNSPKERKENKEALQMAENIL |
| | AIRQSENLRGKYGIKNKHKGQRCFLDFFLEKTEEKYESPKNYGNWTASFLHLKRCISPTLTFDEVDDDFL |
| | KRVREYIDKKALTKSKLPLSLNSKYSYLNKFRAALRLAFEEGYLTINYAQKVKSFKQAESQREYLTFNEV |
| | QRLVETDCKYEVLKRAFLFSCLTGLRWSDINKLVWSEVRDEDDVCRVIYRQEKTEGVEYLYISKQARELL |
| | GERESLNQLVFTNLKYSAIYNNEIVRWCNRAGIHKHITFHSARHTNAVLLLENGADIYTVSKRLGHREIR |
| | TTQIYAKIIDSKMKEASELIPELKFGE |
| 1656 | WP_011279365.1 |
| | MSRDRAVQQRQPKALAVDDEPAYMTEFRQAMLARGLATRTRNAYVRDLRSCELTNHAALTRWQPEDVLCC |
| | LSILTQDGKTPRTQARMLSSLRQFYLWMIASNLREDNPCERIKSPKLGRPLPKDLAEADVDNLLAAPDSS |
| | TALGLRDKAMLEVLYACGLRVSELVNLSLEQVNLNSGWLQITGKGNKTRLVPLGEYASDALEDYLTHGRG |
| | DLIAHLKAGNCQAVFLTAQGGYMTRQNFWYLLKKYAKVASIDKALSPHTLRHAFATHLLNHGADLRSVQL |
| | LLGHSNLSTTQIYTHVATARLQKLHAEHHPRG |
| 1657 | YP_O09221649.1 |
| | MNAFIRKRNKNYVVYLEFRDDESGKRKQKNMGAFDKKRDANKRLAEVKDSIYKDSFLVPNEITLAGFLLD |
| | FLEKYKDNISASTYKSYIAICKNHINPSIGKYRLQELRNIHIQNYIDDLAGNLNPQTIKVHINVLRLAIK |
| | RAYRIKLIKENIIDGIESPRIKKFKNEIYDKEHMLKLLEVAKGTNLELPISLAIGLGLRLSEVLGLTWDN |
| | IDFDENTITVNKITSRLDGSVILKEPKTESSVRKIFAPIELMNLLKNYRLEQNKKLLRSIVRNEYNLLFF |
| | DRKGNPIAEDVMSKKFRKFLENNDLPHIRFHDLRHSHVTLLINSKVPIKVISERVGHSNINTTLNVYSHV |
| | LKEMDKEASDRISENLFKAN |
| 1658 | WP_076384767.1 |
| | MDKAQRYLTAGTRENTRKSYRAAVEHFEVTWGGYLPATAEGIVRYLAEYAETLSLSTLRQRLAALAQWHV |
| | SQGFPDPTKAPHVRQMLKGIRVVHPTRQKQAAPLQLRHLEKAVNWLNSKAADAVESGDYRALMRYRRDAA |
| | LLLIGFWRGFRSDELARLQVEDTQAEAGIGITFYLPYTKADRDHQGSTFHTPALKKLCPVEAYINWITVA |
| | GMTRGPVFRKLDRWGNLSEKGFKSTSLIPLLRRILEEAGIPAQSYSSHSMRRGFATWASANGWDIKGLMS |
| | YVGWKDMKSALRYVDASNSFGGLAAFSPGRIDHDDPESSS |
| 1659 | WP_017135669.1 |
| | MVEVASKADRYLEANIRENTSKSYAAALTHFEVTWGGYLPTTTESVVRYIAEYADQLALSTLKQRLAALA |
| | NWHQSNGFPDPTKAPKVRQLLKGIRAVHPVQQKQAAPLALLHLEKAVAYLEDEVAQARAVGNMAALLKGT |
| | RDIALLTIGFWRGFRGDELARLTIENTHAERYVGIRFYLGSTKGDRQNIGREYKTPSLSKLCPVEAYLTW |
| | IEAAGLTRGGVFRAIDRWGNISDCPIAAHSLIPLLRDTLDRCGLPSEIYSAHSIRRGFATWAASSGWDIK |
| | TLMEYVGWSDMKSALRYVEPAQQFGGLIRKLEG |
| 1660 | WP_102605325.1 |
| | MTANNKDEGVPSILFGERAAQARTHGTLATPEQLAQQHQRFLAAATSDNTRRTYRSAIRHFQAWGGGLPC |
| | DEALVIRYLLAFAEVLNPRTLALRLTALGQWHRYQGFPDPAASATVRKTLRGIERVNGRPRQKAKALLLG |
| | DLELIVAHLDTLEGLAALRDSALLQVGYFGAFRRSELVTLEVRDLQWEREGLRITLPRSKTDQEGEGLER |
| | AIPYGDSLCCPAKALRSWLEAAQIEQGPLFRRISRWGVVGKVALYEGSVNSILAARAGAAGLLYVPEMSS |
| | HSLRRGLATSAYRAGADFLEIKRQGGWRHDATVHSYIEEARAFEENAAGSLLRRKPST |
| 1661 | WP_002827782.1 |
| | MKLPKGIDLMPSGKYKATASIGSGNTRKRKSKSFTTVSDAKAWLLEMNADMHSGTTYVGDDAKITDAYNE |
| | WVATFVTSKVSPATEKGYYFTGKILAKYCEGWLVKTLDRRHCQKLFNQLIADNYTKNTIKKIKVHVGKYC |
| | RSLVTEGVIKRNPMQEIDIRGARLGKDANQKFISISQYKQLLQALKQRPISQMTPYTMVILVILCTGMRV |
| | SEAIDLRQDDLDEIKLTLRVDSSYSRTVHDSKAPKTKNSYRTIPIPKFLLQRLREWRFEQNRLLMLNGHR |
| | NHEQHLFITKFGNVPDASSVNYYVQKLEHTICQIPVGQTTSTHSLRHTYASYLLSREGGNQSLQYVANVL |
| | GDTQAMVQEVYAHLMPEEKASQANVVRDALEVI |
| 1662 | WP_069552141.1 |
| | MLNVLNITDQLPLVDETLLEPHFLALNAQEAAAAFIAAGTAANTVRSYRSALAYWSAWLQLRYGQALGDA |
| | PLPVAVAVQFVLDHLARPLADGAWAHLLPPSIDTALVAAGIKARLGPLAFNTVSHRLAVLGKWHRIKGWD |
| | SPSEASVLKTLLREARKAQSRQGVNVRKKSAIVLEPLQALLATCTDGARGVRDRALLLLAWSGGGRRRSE |
| | VVGLQVSDVRQLDADTWLYALGTTKTDTTGVRREKPLRGQAAQALAAWLAAAPAESGPLFRRLYKGGKIG |
| | TSGLSADQVARIVQRRAQLAGLEGDWAAHSLRSGFVTEAGRQGVPLGEVMAMTEHRSVTTVMGYFQAGAL |
| | LESRASQLYGEPPPAEVLINKPKVEAD |
| 1663 | AZE17458.1 |
| | MKDYPTLFGRYWNYNTLNVIDITDQLPLVDEIPLDPHALALNAQEAAAAFIAAGTAANTVRSYRSALAYW |
| | SAWLQLRYGQTLGDAALPPTVAVQFVVDHLARPLANGNWTHLLPPSVDAALVAARVKAKPGPLAYNTVSH |
| | RLAVLGKWHRLNGWDSPTEAPALKTLLRDARKAQSRQGITVRKKTAVVVEPLQALLATCSDGVRGVRDRA |
| | LLLLAWSGGGRRRSEVVGLQIGDVRRLDADTWLYALGATKTDTGGIRREKPLRGPAAQALTAWLTVAPAD |
| | DGPLFRRLFKGGKVGTQGLSADQVARIVQRRAQLAGLDGDWAAHSLRSGFVTEAGRQGVPLGEVMAMTEH |
| | RSVSTVMGYFQAGSMLSSRATCLLEDEERHRSDQNA |
| 1664 | SDY43398.1 |
| | MKDYPTLFGQYWNYNTLDVIDITDQLPLVDEMPLDPHALALNAQEAAAAFIAAGTAANTVRSYRSALAYW |
| | SAWLQLRYGQALGDAPLPPTVAVQFVVDHLARPLADGNRAHLLPPSVDAALVAARVKAKPGPLAYNTVSH |
| | RLAVLGKWHRLNAWNSPTEAPALKTLLRDARKAQSRQGITVRKKTAVVVEPLQALLATCTDGVRGVRDRA |
| | LLLLAWSGGGRRRSEVVGLQIGDIRKLDADTWLYALGATKTDTGGVRREKPLRGPAAQALTTWLAAAPAE |
| | SGPLFRRLHKGGKVGATGLSADQVARIVQRRAQLAGLEGDWAAHSLRSGFVTEAGRQGVPLGEVMAMTEH |
| | RSVSTVMGYFQAGSLLGSRATQLLGPTQIASEAALEQTAGSTVFCEPTMTSTGD |
| 1665 | AZD92641.1 |
| | MNVIDITDQLPLVDEIPLDPHALALNAQEAAAAFIAAGTAANTVRSYRSALAYWSAWLQLRYGQTLGDAA |
| | LPPTVAVQFVVDHLARPLANGNWTHLLPPSVDAALVAARVKAKPGPLAYNTVSHRLAVLGKWHRLNGWDS |
| | PTEAPALKTLLRDARKAQSRQGITVRKKTAVVVEPLQALLATCSDGVRGVRDRALLLLAWSGGGRRRSEV |
| | VGLQIGDVRRLDADTWLYALGATKTDTGGIRREKPLRGPAAQALTAWLTVAPADDGPLFRRLFKGGKVGT |
| | QGLSADQVARIVQRRAQLAGLDGDWAAHSLRSGFVTEAGRQGVPLGEVMAMTEHRSVSTVMGYFQAGSML |
| | SSRATCLLEDEERHRSDQNA |
| 1666 | WP_082143226.1 |
| | MGYWRIIPCHNPFNRQCTCHQYEKAPMSDLDRYLNAATRDNTRRSYRAAIEHFEVSWGGFLPATSDAVAR |
| | YLVAHAGVLAVNTLKLRLSALAQWHTSQGFPDPTKAPVVRKVLKGIRAVHPVREKQAEPLQLKHLEQVVA |
| | FLETDALQASATQDPPRLLRAKRDTALILLGFWRGFRSDELCRLSIEHVQAVPGAGISLYLPRSKSDRDN |
| | LGRTYQTPALLRLCPVQAYSEWLSASALVRGPVFRGIDRWGNLGEEGLHPNSVIPLLRQALERAGIPAEQ |
| | YTSHSLRRGFATWAHRSGWDLKSLMSYVGWNDMKSAMRYVEATPFLGMTLATPALI |
| 1667 | WP_110623642.1 |
| | MNVLDITDQLSLVNETSLHPQFLALNAQEAAAAFIAAGTAANTVRSYRSALAYWSAWLQLRYGHVLGDAP |
| | LPAAVAVQFVVDHLARPTADGEWVHLLPASIDAALITAKVKAKPGAQAYNTVCHRLAVLGKWHRLNSWDS |
| | PTEVPALKSLLREARKAQSRQGLSVRKKTAIVLEPLQALLATCTDGLRGQRDRALLLLAWSGGGRRRSEV |
| | VNLQISDVRQLDTDTWLYTLGATKTDTGGIRREKPLRGPAAEALTAWLKAAPAQSGPLFRRMYKGDKVGA |
| | TGLSADQVARIVQRRAKLAGLDGDWAAHSLRSGFVTEAGRQGVPLGEVMAMTEHRSVSSVMGYFQAGALL |
| | ESRATTLLKSSTVGDEGPLKSLYVGANEDAEHP |
| 1668 | RIA35947.1 |
| | MNVLNITEYLSLANETQLDLHSLAINAQEAAAAFIASGTAANTLRSYRSALAYWSAWLQLRYGQALGDAA |
| | LPSSVAVQFVVDHLARPTADGGWAHLLPPTIDAALVAARVKAKLGPLAYNTVSHRLAVLGKWHRINGWGS |
| | PTETVALKALMREARKAQSRHGVSVRKKTAIILEPLQALLATCTDGVRGVRDRALLLLAWSGGGRRRSEV |
| | VGLQIGDVRRLDADTWLYALGTTKTDTGGLRREKPLRGPAALALAAWLEVAPAESGPLFRRIYRGGKVGP |
| | QGLSADQVARIVQRRAQLAGLDGDWAAHSLRSGFVTEAGRQSVPLGEVMAMTEHRSVTTVMNYFQAGSLL |
| | SSQASQLLGPAVGATASAERSDSDSSP |
| 1669 | AZC51718.1 |
| | MNVIDITDQLPLVDEMPLDPHVLALNAQEAAAAFIAAGTAANTVRSYRSALAYWSAWLQLRYGQVLGDAP |
| | LPPAVAVQFIVDHLARPEAGGSWTHLLPPSIDAALVTARVKAKVGPLAYSTVSHRLAVLAKWHRLKDWDN |
| | PGDAPAVKTLLREARKTQTRQGVNVRKKTAIVLEPLQAMLATCTDGVRGVRDRALLLLAWSGGGRRRSEV |
| | IGLLVEDLRRLDANTWLYALGATKTDTGGVRREKPLQGPVAQALAAWLAAAPASSGPLFRRLYKGGRVGS |
| | AGLSGDQVARIVKRRAALAGLDGDWAAHSLRSGFVTEAGRQGVPLGEVMAMTEHRSVSTVMGYFQAGSLL |
| | GSRASQLLPITQEDDGGNSELLTTGDSH |
| 1670 | WP_003452352.1 |
| | MNVLNITEHLSLANETQLDLHSLAINAQEAAAAFIAAGTAANTLRSYRSALAYWSAWLQLRYGQALGDAA |
| | LPSSVAIQFVVDHLARPTAGGGWVHLLPPTIDAALVAARVKAKLGPLAYNTVSHRLAVLGKWHRINGWGS |
| | PTETAALKALLREARKAQSRHGVSVRKKTAIILEPLQALLATCTDGVRGIRDRALLLLAWSGGGRRRSEV |
| | VGLQIGDVRRLDADTWLYALGTTKTDTGGLRREKPLRGPAALALAAWLEVAPAESGPLFRRIYRGGKVGT |
| | QGLSADQVARIVQRRAQLAGLDGDWAAHSLRSGFVTEAGRQSVPLGEVMAMTEHRSVTTVMNYFQAGSLL |
| | SSQASQLLGPAVGATASEERSDSDRSP |
| 1671 | WP_108099739.1 |
| | MNVLEITQQLPLSDEPLLEPHLLAESAQEAAKAFIAGGTAANTVRSYQSALTYWSAWLRLRYGVALGDKA |
| | LPAELVIQFIVDHLARPLEDGSWTHLLPASIDAALVAARVKAKPGPLAHSTVSHRLAVLSKWHRLNDWDS |
| | PVEMPAVKTLLRDARKAQVRQGITVRKKTAVVAEPLQAMLATCTDGVRGIRDRSLLLLTWSGGGRRRSEV |
| | VAMQIGDVRALDADTWLYALGATKTDSSGARREKPLRGQAAVALAEWLAVAPADSGPLFRRMFKGDKVST |
| | LGLSTDQVARIVKRRAKLADLDGNWAAHSLRSGFVTEAGRQGVPLAEVMAMTEHRSVGTVMGYFQVGTLL |
| | NSRATTLLAEPLTPPDQREHEHG |
| 1672 | WP_110637560.1 |
| | MNNTDALQARFDNPLALHEIADTTRAAAEAFIAAGTAVNTVRSYRSALAYWAAWLRLRYGRALGDGALPP |
| | EVAVQFIVDHLARPNADGTWSHLLPANVDAALVAAGVKGKLGALAFSTVSHRLAVVAKWHRLKDWDNPCE |
| | AAAVKTLLREARKAQARQGMAVRKKTAVVLEPLQRMLTTCTDGVRGIRDRALLLLAWSGGGRRRSEVVGL |
| | QIEDLRRLDTDTWLYALGATKTETSGIRREKPLRGPAAQALAAWLAIAPAVSGPLFRRLYKGGKVGTAAL |
| | SADQVARIVQRRAQLAGLEGDWAAHSLRSGFVTEAGRQGVPLGEVMAMTEHRSVNTVTGYFQAGAMLSSR |
| | ATCLLGDEELHRPDQNA |
| 1673 | WP_045217896.1 |
| | MNNTILPLHGEIAPLAVDRLDAEARAAAAAFVAAGTAANTVRSYRSALAYWAGWLQLRYRRHLEDGALPE |
| | AVAVQFLVDHLARPVEGDWQQLLPPALDAALVESGVKAKPGPLSYNTVRHRLAVLAKWHDLKSWPSPTDS |
| | AAVKTLLREARKAQSRQGVSVRKKTAAVREPLEAMLATCTDGVRGLRDRALLLLAWSGGGRRRSEVVGLQ |
| | IGDVRPLDADTWLYALGATKTKTEGVRRELPLRGSAAQALTEWLAAAPATTGPLFRRVYKGGRVGTDELS |
| | GDQVARIVKRRAVLAGLPGDWAAHSLRSGFVSEAGRQGVPLGEVMAMTEHRSIPTVMGYFQAGTLLNSRA |
| | AHLLALPLNTQADASKSSETRQA |
| 1674 | WP_128325317.1 |
| | MNNTLPLDGLPNTPLALHGLADSTRAAAEAFISAGTAANTVRSYQSALSYWSAWLQLRYRRSLGDGALPP |
| | DVAVQFIVDHLARPDGDGNWSQLLPPQLDAALVAAGVKGKLGALAFSTVSHRLAVLAKWHRLNAWDNPCE |
| | ASAVKTLLREARKAQARQGVALRKKTAVVLEPLQAMLATCSDGVRGIRDRALLLLAWSGGGRRRSEVVGL |
| | QVEDLRRLDADTWLYALGVTKTDTGGVRREKPLQGPAAHALQGWLEAAPARSGPLFRRLYKGGRVGSAGL |
| | SGDQVARIVKRRAALAGLEGDWAAHSLRSGFVTEAGRQGVPLGEVMAMTEHRSVNTVMGYFQAGSLLGSR |
| | AANLMGNESVDTERAPDHTTTHTKPNH |
| 1675 | OWK92550.1 |
| | MNNTESLQPSIDTPLAPHELAASTRAAAEAFIAAGTAANTVRSYQSALAYWSAWLRLRYRRALGDAALPP |
| | EVAVQFIVDHLARPGADGGWSHLLPADLDAALVVMGVKGKLGALAFSTVSHRLAVLAKWHRLKQWDNPTE |
| | TPAVKTLLREARKAQVRQGVAQRKKTAVVLEPLQAMLATCSDGVRGVRDRALLLLAWSGGGRRRSEVIGL |
| | QIEDLRRLDADTWLYTLGATKTDTGGVRREKPLQGPAAQALSAWLEAAPACRGPLFRRLYKGGRVAPHGL |
| | SGDQVARIVKRRAAMAGLDGDWAAHSLRSGFVTEAGRQGVPLGEVMAMTEHRSVSTVMGYFQAGALLDSR |
| | ASKLLGSTPGASEPPPE |
| 1676 | WP_024717480.1 |
| | MNNTESLQPSIDTPLAPHELAASTRAAAEAFIAAGTAANTVRSYQSALAYWSAWLRLRYRRALGDAALPP |
| | EVAVQFIVDHLARPGADGGWSHLLPADLDAALVAMGVKGKLGALAFSTVSHRLAVLAKWHRLKQWDNPTE |
| | TPAVKTLLREARKAQVRQGVAQRKKTAVVLEPLQAMLATCSDGVRGVRDRALLLLAWSGGGRRRSEVIGL |
| | QIEDLRRLDADTWLYTLGATKTDTGGVRREKPLQGPAAQALSAWLEAAPACRGPLFRRLYKGGRVAPHGL |
| | SGDQVARIVKRRAAMAGLDGDWAAHSLRSGFVTEAGRQGVPLGEVMAMTEHRSVSTVMGYFQAGALLDSR |
| | ASKLLGSTPGASEPPPE |
| 1677 | WP_101293615.1 |
| | MNNTDPFEVLPIAPLALHGLADSTQAAAEAFIAAGTAANTVRSYRSALAYWAAWLQLRYGRAIGDGALPS |
| | DVAVQFIVDHLARPDADGDWSQLLPAQLDAALVAAGVKGKLGALAFNTVNHRLAVLAKWHRLNDWDNPCE |
| | APTVKTLLREARKAQARQGVALRKKTAMVLEPLQAMLATCTDGVRGVRDRALLLLAWSGGGRRRSEVTAL |
| | RVEDLRRLDADTWLYALGATKTDTGGVRREKPLRGPAAQALNAWLAAAPASSGPLFRRLYKGGRVGSASL |
| | SGDQVARIVKRRAQLAGLEGDWAAHSLRSGFVTEAGRQGVPLGEVMAMTEHRSVTTVMGYFQAGALLESR |
| | ASLLFGESPVAETVNEAPPTDVQT |
| 1678 | WP_031642620.1 |
| | MQPSIDTPLAPHELAASTRAAAEAFIAAGTAANTVRSYQSALAYWSAWLRLRYRRALGDAALPPEVAVQF |
| | IVDHLARPGADGGWSHLLPADLDAALVVMGVKGKLGALAFSTVSHRLAVLAKWHRLKQWDNPTETPAVKT |
| | LLREARKAQVRQGVAQRKKTAVVLEPLQAMLATCSDGVRGVRDRALLLLAWSGGGRRRSEVIGLQIEDLR |
| | RLDADTWLYTLGATKTDTGGVRREKPLQGPAAQALSAWLEAAPACRGPLFRRLYKGGRVAPHGLSGDQVA |
| | RIVKRRAAMAGLDGDWAAHSLRSGFVTEAGRQGVPLGEVMAMTEHRSVSTVMGYFQAGALLDSRASKLLG |
| | STPGASEPPPE |
| 1679 | WP_042948796.1 |
| | MQPSIDTPLAPHELAASTRAAAEAFIAAGTAANTVRSYQSALAYWSAWLRLRYRRALGDAALPPEVAVQF |
| | IVDHLARPGADGGWSHLLPADLDAALVAMGVKGKLGALAFSTVSHRLAVLAKWHRLKQWDNPTETPAVKT |
| | LLREARKAQVRQGVAQRKKTAVVLEPLQAMLATCSDGVRGVRDRALLLLAWSGGGRRRSEVIGLQIEDLR |
| | RLDADTWLYTLGATKTDTGGVRREKPLQGPAAQALSAWLEAAPASRGPLFRRLYKGGRVAPHGLSGDQVA |
| | RIVKRRAAMAGLDGDWAAHSLRSGFVTEAGRQGVPLGEVMAMTEHRSVSTVMGYFQAGALLDSRASKLLG |
| | STPGASEPPPE |
| 1680 | WP_103326070.1 |
| | MSELDRYLQAATRDNTRRSYRAAIEHFEVQWGGFLPATAEGVARYLAAYAGELSINTLKLRLSALAQWHN |
| | SQGFVDPTKAPVVRQVLKGIRAVHPAQEKQAVPLQLQDLERVASWLDEQASQALAERCQAGLLRARRDRA |
| | LILLGFWRGFRSDELCRVQVEHVQAHAGSGISLYLPRSKGDRDNLGRTYSTPALQRLCPVQAYIEWINTA |
| | ALVRGPVFRAIDRWGNLGEQGLHANSVIPLLRQVLEQAGIAAECYTSHSLRRGFATWAQRSGWDLKSLMA |
| | YVGWKDLKSAMRYVEAEPFAGMAQLREKAVAP |
| 1681 | WP_076449657.1 |
| | MLDWKVALEALDGAYSDATMRAYFADVQAYVSWCDETVCDPLPGSVAQICAFIEDQGRNKAPSTVRRRLY |
| | AIRKVHRLLGLPDPTEDEAINLALRRVRRANPVRPQQARGLNASDLERFLAVQPKTPWGLRNAAMLALGY |
| | ELMTRRSELIALRDSDLELRSDGTLRVLIRRSKADQEGQGRLAFTSVKTADRVRFWQEWRGCVTDWLFCP |
| | IYQGQPIDRGLSDTTVKTVIKTAAKRAGFPPEDVRAFSGHSMRVGAAQDLLKRGFDTSAIMRAGGWKSVS |
| | VLARYLEVAEQNVWEM |
| 1682 | WP_074635693.1 |
| | MPQIIERKRKDGSTAYVAQINIRRNGKWAHRESRTFDKHSSASAWFKKRMKEITAAGADLTAINSKGRTL |
| | STAIDRYITESVKEIGRTKAQVLRSIREYDIASMNCNDIQSHDIVQFAKELGATRTPATVGNYLSHLGAI |
| | FAVARPAWGIPLDQQAMKDAFVVCNRLGITGKAKRRDRRPTLDELDALLTMFEDKHRRRPNSLPMHRVVG |
| | FALFSTRRQEEITRVAWKGLDQTHNRVFIKDMKHPGDKVGNDVWYDLPAPAINIAMAMPRKKPLVFPYHS |
| | DTISAAFTRACKVLEIEDLRFHDLRHEGVTRLFETGETIPQVAAVSGHRSWSSLQRYTHIKQTGDKYEDW |
| | KWLQRLTTSN |
| 1683 | WP_034633966.1 |
| | MGVILMKVITLLTKEGKTRYMLLDHNNEPVQPVLHYLKFKDNSGASRNTLRSFSYHLKLFFEFLEQINKD |
| | YRDIGIDEMADFIRWLQNPHQDVKVSPIFPKQPIRKAKTVNIIINTVLGFYDYLMRHEDYSIQLTERLKK |
| | QVPGSRKGFKSFLHHINKNKSFTSHILKLKVPKQQPKTLSKDQIALIMNACVNMRDLFLIQLLWESSMRI |
| | GEALTLWLEDFEVDARKIHIRDRGELSNLAEIKTVCSPRSIDVSEDLINMYFDYIAQFHTDEVDTNHVFI |
| | KLTGENKGQPLEYTDVVALVQRLRKKTGIYFTPHMLRHTSLTELRKAGWRDEHLMNRAGHAHIQTTMQMY |
| | IHPSDEDIRKDWENAQDRMKINKENKENNE |
| 1684 | WP_012549223.1 |
| | MATVAIEKVIGKKAIKYKARVRLTSNRKRIFEQSKTFTKESEAKNWATKLAKQLNKSGVPTEKQKTILIG |
| | DLITKYLIDPVTSASIGRSKYAVLSRLRAYDIALIQADLLTAHDLINHCRVRKEESTHPLPQTIYHDITY |
| | LKSVIDVAEPMFGYIANTKAHHDAIPTLVRYDLIGRSQRRERRPTNKELVTMEQGLTRRQSHRCANIPLV |
| | DIEHLSIMTCMRLGEITRITWDDVDFKASTLTIRDRKDPRNKHGNNCIIPLYQKVKEIIERQPKVGTLIF |
| | PYKKESIGAAWQRVCKEEGIEDLHYHDLRAEGACQLFERGLNIVEVSKITGHKDINVLNNVYLRLGISEI |
| | HHNLSS |
| 1685 | WP_O16110451.1 |
| | MEFDIIKINNQTSLKQIEKYKKRFANILSLWNDNVLDEAELRKETNERDDKQTYEGFSDEEILYYYLNRQ |
| | THFDKEKRIKDNSRTLYARDLSQFYFFIKQSKEFLQQDVKDYEEGYMWGNLRKRHIRSYQKWLSQEAISY |
| | QSNQRYKPSTVSRKLGIIRSFLKWLYEIQYIQDPLHVEILSTTVAKLHKPKRDLSYEEVKQLLNYYKGNE |
| | INYALVSFLATTGLRIAEVAHAKWKDIEYDSVRNRYYLRVDTKGDDERIVSINKEIFQRIISFRIRRRLT |
| | IDLGNQDGGTIFQTKNHTAYRENYLSQYITKIIKDTGLPFTKNIRITPHFFRHFYVQYLYDYKGLPPHLI |
| | AAAVGHKDDRTTKENYLKQRLTKDSDAGNLIGENEF |
| 1686 | WP_048658860.1 |
| | MILKKNANYYSSLAPNQVFDSERKAMQLEKRLALKLERECAGKDFRTLDELITLWYRMHGKTLRDHIRLR |
| | KSLYRISERLGNPIASDFTSKDFAHYREQRSIEVTTTTINREHAYLRAMFNELERLGVIEFENPLIKIRQ |
| | FKEREKELRYLAHDEIARLLESCQTFSNQSLSFIVKICLATGARWGEAESLKPSQIKNNQITFLNTKSSK |
| | NRTVPINKTLYDELTALESISEERMFLNSLSAFRKAVAEAKIDLPKGQMTHVLRHTFASHYVMSGGNIVK |
| | LRDVLGHSEITTTMRYAHLAPEHLEETLTLNPLNQHQNTTDS |
| 1687 | WP_069945392.1 |
| | MKYHPITDTIELQALQRDILDSQEFKSVYPTLSEYIDSFEQQGIPAKNDLKQLLNFLVTGLSNAKGTQSR |
| | FRNEAERFTLFCWHERGKSVLDIKLEDIKLYIDWIWSPPKNLIADTTISSRFKYRSNSDIRVVNPEWRPF |
| | VHRTPKANRKIESLIAPGKASSIKHAYKLSQTSLRNSYASLNIFFKWLIDAELVMRNYLADAKKNCKYLI |
| | KGKIYQPPHTFDDEVWDIFIQCLTDAADENPKFEIHRFVVLSLKVLFLRISELSSRDYYTPLFNHFRPDP |
| | SNEGWVLHVVGKGKKERVVTVPDSYIENVLGRYRESMDLAPLPRIDEDTPILPSTKTGKPLKQDSVNNIV |
| | EEAFDLVISTLMKSGKKQQALDIAGASSHWLRHTGATQALDELNETMLAEELGHASVKTTVEIYVAPAHR |
| | DRIRKGSQRKL |
| 1688 | WP_085070731.1 |
| | MNELTTDLKLLHEATLNNLKNSKANNTLRAYKSDFKDFGAFCAKNGLNSLPTEPKIVSLYLTHLSKNSKI |
| | STLRRRLVSISMVHKMKGHYLDTKHPIIVENLMGIRRVKGSIQRGKKPLLINHLKLLIDTINEQKTEEIK |
| | KFRDKSLILIGFGGGFRRTELISIDHEDLEFVPEGLKITIKKSKTDQYGEGMIKGIPYFSTENYCPVKNL |
| | NKWLEISKIKSGPIFRRFSKGLSLTDKRLTDQSVVLLMKEYLNLAGIENTNFAGHSLRSGFATVAAESGA |
| | DERSIMAMTGHKTTQMVRRYIREANIFKNNALNKVKF |
| 1689 | OCW82643.1 |
| | MNEITTDLKSLHEATLNNLKSSKANNTLRAYKSDFKDFGAFCAKHGLNPLPTEPKIVSLYLTHLSKNTKI |
| | STLRRRLVSISMVHRLKGHYLDTKHPIIVENLMGIRRIKGSIQKGKKPLLINHLKLIINVINEQKTEEIK |
| | KLRDKSIILIGFGGGFRRTELISIDHEDLEFVSEGLKITIKRSKTDQFGEGMIKGLPYFDNEIYCPVTNL |
| | QKWLEISKIKSGPIFRRFSKGLSLTDKRLTDQSVVLLMKEYLKLAGIENKNFAGHSLRSGFATVAADSGA |
| | DERSIMAMTGHKTTQMVRRYIREANIFKNNALNKIKV |
| 1690 | WP_037412868.1 |
| | MAPFLGPNAKGPKIEGPKMAKIAKKLTDTEIKNTKPAEKEINLFDGDGLMLRIAPLSKGGKKNWYFRYAV |
| | PVTKKRTKMSLGTYPHLTLAKARALRDEYLSLLANGIDPQIHNNDKANALKDATEHTLQAVARKWLDEKV |
| | KTSGISPDHAEDIWRSLERNIFPGLGNVPIKEIRPKLLKQHLDPIEQRGVLETLRRIISRLNEIFRWAAT |
| | EELIEFNPADNLGHRFSKPKKQNMPALPPNELPRFMLAISNASIRLETRLLIEWQLLTWVRPGEAVRARW |
| | SDIDEDNRFWNIPGEFMKMKRPHKIPLSKEAMRILESIKPISGHREWVFPSIKAPLNHMHEQTANAAIIR |
| | MGFGGELVAHGMRSIARTAAEESGKFRTEVLESALAHTKNNEIIAAYNRSEYLAERTELMQWWGDYVQAQ |
| | KYKAIAA |
| 1691 | WP_076591309.1 |
| | MNNVDHYLHAATRENTRKSYQAAVRHFEVEWGGFLPATANSVARYLADHAELLSANTLRQRLAALGQWHI |
| | DQGFPDPTKAPIVRNVFRGIRASHPSQEKQAKPLLLAEVEQVATSLSAFAAQAQEKGDRSLSLRLKRNNA |
| | LLLIGFWRGFRADELTRLAVESISVVPGEGMICYLPHTKGDRQYRGTPFKVPALAKLCPVSAYQDWQNSA |
| | QLTDGPVFRAIDRWGHVGERGMHVDSIGPLLRSILSENGVVSSELYSSHSLRRGFANWAISSGWDIKTLM |
| | SYVGWKDVQSAARYVDAADPFGNHLLSSAS |
| 1692 | WP_013525333.1 |
| | MAPIVDLSRENRPEESKAPSHSTTAIASTSPPSPPADDLPDIVDIVMEMAQAPCEPQNAPPLPAHLEGLA |
| | ERARDYVEAASSANTRRAYAADWKHFCAWARRQHLDVLPPDPQVVGLYITACASGKVTGDKKPNAVSTIE |
| | RRLSSITWNFSQRGQPLDRKDRHIATVLAGIRNTHASPPRQKEAILTEDLIAMLETLDRGTLRGLRDRAM |
| | LLLGFAGGLRRSEIVGLDVARDQTQDGRGWIEVLDKGVLVALRGKTGWREVEIGRGSSDATCPVVAVQTW |
| | LKLARVGHGPLFRRVTGNGKAVAAERLNDQEVARLVKRTALAAGVRGDLSEGDRAEKFSGHSLRAGLASS |
| | AEVDERYVQKQLGHTSAEMTRRYQRRRDRFRVNLTRASGL |
| 1693 | WP_127402674.1 |
| | MAPIVDLSRENRPEESKAPSHSTTAIASTSPPSPPADDLPDIVDIVMEMAQAPCEPQNAPPLPAHLEGLA |
| | ERARDYVEAASSANTRRAYAADWKHFCAWARRQHLDVLPPDPQVVGLYITACASGKVTGDKKPNAVSTIE |
| | RRLSSITWNFSQRGQPLDRKDRHIATVLAGIRTTHASPPRQKEAILTEDLIAMLETLDRGTLRGLRDRAM |
| | LLLGFAGGLRRSEIVGLDVARDQTQDGRGWIEVLDKGVLVALRGKTGWREVEIGRGSSDATCPVVAVQTW |
| | LKLARVGHGPLFRRVTGNGKAVAAERLNDQEVARLVKRTALAAGVRGDLSEGDRAEKFSGHSLRAGLASS |
| | AEVDERYVQKQLGHTSAEMTRRYQRRRDRFRVNLTRASGL |
| 1694 | WP_066605681.1 |
| | MTPALSERWRQHLALDRRRSVHTVRAYVATAERLIAFLEQHRGEGVSPATLAHIDQAELRAFLASRRTDG |
| | IGNLSAARELSAVRGFLRFVGGDDARVPLLKGPRVKRGLPRPISPDEAVALAQDIAETAREGWIGARDWA |
| | VLLLLYGAGLRIGEAMGLHGDILPLGDTLRVTGKRGKTRIVPLLPQVRAAIDAYVDACPYPPARDQPLFR |
| | GARGGPLSPALIRRAVQGARGRLGLSDRTTPHALRHSFATHLLGRGADLRSLQELLGHASLSSTQVYTQV |
| | DAAHLLDIYRNAHPRA |
| 1695 | WP_080957039.1 |
| | MLISPELGSIFSQWGFFAVREEGSPMTDPADRYLRPVQRDSTQRRYQGVLRYFEQGWGACLPASGDTVVR |
| | YLVEHAESLSSSTLGLHLAALAQWHHSHGFDDPTKNAQVRQVLRSIRAQXPRLVKQAEPLPLIELERCVT |
| | GLQQRIASDHPVVRLRASRDQALILMGFWRAFRADELCRLRVEHNALCRGKQLEVFLGSSKTDREYRGQV |
| | VLLPALKRLCPVQAYEDWLAISELQEGPVFRPINQWGHISPLGLKPDGVTYVLREAFACSGLDGAAYTGH |
| | SLRRGFATWANNDSWTTKQLMDYVGWRDVKSAMRYIDTTAPFGDLRR |
| 1696 | KKX62373.1 |
| | MTDPADRYLRPVQRDSTQRRYQGVLRYFEQGWGACLPASGDTVVRYLVEHAESLSSSTLGLHLAALAQWH |
| | HSHGFDDPTKNAQVRQVLRSIRAQXPRLVKQAEPLPLIELERCVTGLQQRIASDHPVVRLRASRDQALIL |
| | MGFWRAFRADELCRLRVEHNALCRGKQLEVFLGSSKTDREYRGQVVLLPALKRLCPVQAYEDWLAISELQ |
| | EGPVFRPINQWGHISPLGLKPDGVTYVLREAFACSGLDGAAYTGHSLRRGFATWANNDSWTTKQLMDYVG |
| | WRDVKSAMRYIDTTAPFGDLRR |
| 1697 | WP_040041154.1 |
| | MPKLQPKQLEAQRAGDNGKTLRDDGGLFGRVRAKADGTVSISFYYRYRFDGKLKDYACGTWPRESLSKIR |
| | TTRDAAKLLVKQHIDPSSHQKVAKQDAKDAVTARLAEIERQKSEALTFQDLFDTWLLDGVRRADGNAELK |
| | RSFNADVLPKLGKKQIKELTEHDLRGVLRAIVTRGANRTAVVMRNNLTQMFVWAEKRQPWRKLLVDGNPM |
| | DLIEIEKVVSTDYDMNNRRERLLAEEEIRELHDIFQRMQAAYDAAPKKRTAAQPVEKTTQCAIWIMLATL |
| | CRVGETSKARWEHINFDTGEWFIPQDDTKGKRSELTVFLSDFALDQFRQLYKLTGHSEWCFPAKNREGHV |
| | CEKSISKQVGDRQCRFKKGKDGNPRKPMKRRRHDDTLVLANGKNGAWTPHDMRRTGATMMQSLGIALDI1 |
| | DRCQNHVLEGSKVRRHYLHHDYAPEKREAWRLLGEQLTLILSASTHNKAPQQSSQREAPSRSH |
| 1698 | WP_004691481.1 |
| | MSTKLKNGQSRYQSKAKVVTIKKFQLSTLRKAADRLNDAAFEKHGDAYLEFPVIIQGDGNPSEIFNLYLL |
| | KKLEQTIQYDFKTFASIAHQLVDFQRFLEDEQLDCLKFHKLKQLNAIFKYRTRLIEQANAGLISASSARG |
| | RINAVVNFYRFLVTEDLVDHQRYGLPFQDVYKYIAVDNEFGARRKMAIKSHDLAIHVPAKAQNSEAILDG |
| | GELSPLTVEEQAVVLKALQKSSLEYQLMFYLALFTGARLQTICTLRIKCLFNRESDNHGFIRLPVGAGTG |
| | VDTKFQKPMTLLIPHWLALDLKIYINSEQAQQRRQKSNYADSDENYVFLTKLGTPFYTSKAEQQELTDKI |
| | KASDSFGARLKLYEGEAVRSYLKGVLLPEIRLIDPQFQSFKFHDLRASFGMNLLESQLQHLPEGHSAMTA |
| | VEYVQARMGHRNISTTLQYLNYKSRLQWRNKIQHEYESSLMKYVMSSVNPVGDFS |
| 1699 | WP_049006636.1 |
| | MTDKTKLVAISRTDDISALDALKLLRFRRYNTARSQLRVTSVWSAWCARHGLTPFPVTAVDVERYINGLN |
| | GSVKMATISHFIACLSSVNSSLGFPDFRNVLIKALVQVWRARENEKKIVTGQALPFLISDLNILRRSLHK |
| | SDDLRDIRDLAMIWVGFETLLRNVEIRRIKTGDLKWQDDTSCYLLDVMRTKTSLSSNLTFQLSPQCSQHV |
| | RRLIETVEYTDTETFGHRFLFQPVNIHTNRYFPSTSSKLSRGKSIDRMLVKAGFSEGLLTQLQNESKVSR |
| | EDVGMLSSNSLNQAFARLWGIAGKVSDSNRQSGRYRTWTGHSVRVGGAIELFKAGYSLEKITEMGNWSDP |
| | KMVFRYIRGYLASEKAMVSFMRNHLDDI |
| 1700 | WP_104460435.1 |
| | MTDKTKLVAISRTDDISALDALKLLRFRRYNTARSQLRVTSVWSAWCARHGLTPFPVTAVDVERYINGLN |
| | GSVKMATISHFIACLSSVNSSLGFPDFRNVLIKALVQVWRTRENEKKIVTGQALPFLISDLNILRRSLHK |
| | SDDLRDIRDLAMIWVGFETLLRNVEIRRIKTGDLKWQNDTSCYLLDVMRTKTSLSSNLTFQLSPQCSQHV |
| | RRLIETVEYTDTETFGHRFLFQPVNIHTNRYFPSTSSKLSRGKSIDRMLVKAGFSEGLLTQLQNESKVSR |
| | EDVGMLSSNSLNQAFARLWGIAGKVSDSNRQSGRYRTWTGHSVRVGGAIELFKAGYSLEKITEMGNWSDP |
| | KMVFRYIRGYLASEKAMVSFMRNHLDDI |
| 1701 | WP_004186933.1 |
| | MTDKTKLVAISRTDDISALDALKLLRFRRYNTARSQLRVTSVWSAWCARHGLTPFPVTAVDVERYINGLN |
| | GSVKMATISHFIACLSSVNSSLGFPDFRNVLIKALVQVWRARENEKKIVTGQALPFLISDLNILRRSLHK |
| | SDDLRDIRDLAMIWVGFETLLRNVEIRRIKTGDLKWQNDTSCYLLDVMRTKTSLSSNLTFQLSPQCSQHV |
| | RRLIETVEYTDTETFGHRFLFQPVNIHTNRYFPSTSSKLSRGKSIDRMLVKAGFSEGLLTQLQNESKVSR |
| | EDVGMLSSNSLNQAFARLWGIAGKVSDSNRQSGRYRTWTGHSVRVGGAIELFKAGYSLEKITEMGNWSDP |
| | KMVFRYIRGYLASEKAMVSFMRNHLDDI |
| 1702 | WP_094320139.1 |
| | MTDKTKLVAISRTDDMSALDALKLLRFRRYNTARSQLRVTSVWSAWCARHGLTPFPVTAVDVERYINGLN |
| | GSVKMATISHFIACLSSVNSSLGFPDFRNVLIKALVQVWRARENEKKIVTGQALPFLISDLNILRRSLHK |
| | SDDLRDIRDLAMIWVGFETLLRNVEIRRIKTGDLKWQNDTSCYLLDVMRTKTSLSSNLTFQLSPQCSQHV |
| | RRLIETVEYTDTDTFGHRFLFQPVNIHTNRYFPSTSSKLSRGKSIDRMLVKAGFSEGLLTQLQNESKVSR |
| | EDVGMLSSNSLNQAFARLWGIAGKVGDSNRQSGRYRTWTGHSVRVGGAIELFKAGYSLEKITEMGNWSDP |
| | KMVFRYIRGYLASEKAMVSFMRNHLDDI |
| 1703 | WP_032435650.1 |
| | MTDKTKLVAISRTDDMSALDALKLLRFRRYNTARSQLRVTSVWSAWCARHGLTPFPVTAVDVERYINGLN |
| | GSVKMATISHFIACLSSVNSSLGFPDFRNVLIKALVQVWRARENEKKIVTGQALPFLISDLNILRRSLHK |
| | SDDLRDIRDLAMIWVGFETLLRNVEIRRIKTGDLKWQNDTSCYLLDVMRTKTSLSSNLTFQLSPQCSQHV |
| | RRLIETVEYTDTETFGHRFLFQPVNIHTNRYFPSTSSKLSRGKSIDRMLVKAGFSEGLLTQLQNESKISR |
| | EDVGMLSSNSLNQAFARLWGIAGKVGDSNRQSGRYRTWTGHSVRVGGAIELFKAGYSLEKITEMGNWSDP |
| | KMVFRYIRGYLASEKAMVSFMRNHLDDI |
| 1704 | WP_014386529.1 |
| | MTDKTKLVAISRTDDMSALDALKLLRFRRYNTARSQLRVTSVWSAWCARHGLTPFPVTAVDVERYINGLN |
| | GSVKMATISHFIACLSSVNSSLGFPDFRNVLIKALVQVWRARENEKKIVTGQALPFLISDLNILRRSLHK |
| | SDDLRDIRDLAMIWVGFETLLRNVEIRRIKTGDLKWQNDTSCYLLDVMRTKTSLSSNLTFQLSPQCSQHV |
| | RRLIETVEYTDTETFGHRFLFQPVNIHTNRYFPSTSSKLSRGKSIDRMLVKAGFSEGLLTQLQNESKVSR |
| | EDVGMLSSNSLNQAFARLWGIAGKVGDSNRQSGRYRTWTGHSVRVGGAIELFKAGYSLEKITEMGNWSDP |
| | KMVFRYIRGYLASEKAMVSFMRNHLDDI |
| 1705 | WP_017901102.1 |
| | MTDKTKLVAISRTDDMSALDALKLLRFRRYNTARSQLRVTSVWSAWCARHGLTPFPVTAVDVERYINGLN |
| | GSVKMATISHFIACLSSVNSSLGFPDFRNVLIKALVQVWRARENEKKIVTGQALPFLISDLNILRRSLHK |
| | SDDLRDIRDLAMIWVGFETLLRNVEIRRIKTGDLKWQNDTSCYLLDVMRTKTSLSSNLTFQLSPQCSQHV |
| | RRLIETVEYTDTETFGHRFLFQPVNIHTNRYFPSTSSKLSRGKSIDRMLVKAGFSEGLLTQLQNESKVSR |
| | EDVGMLSSNSLNQAFARLWGIAGKVSDSNRQSGRYRTWTGHSVRVGGAIELFKAGYSLEKITEMGNWSDP |
| | KMVFRYIRGYLASEKAMVSFMRNHLDDI |
| 1706 | WP_110204872.1 |
| | MTDKTKLVAISRTDDMSALDALKLLRFRRYNTARSQLRVTSVWSAWCARHGLTPFPVTAVDVERYINGLN |
| | GSVKMATISHFIACLSSVNSSLGFPDFRNVLIKALVQVWRARENEKKIVTGQALPFLISDLNILRRSLHK |
| | SDDLRDIRDLAMIWVGFETLLRNVEIRRIKTGDLKWQNDTSCYLLDVMRTKTSLSSNLTFQLSPQCSQHI |
| | RRLIETVEYTDTETFGHRFLFQPVNIHTNRYFPSTSSKLSRGKSIDRMLVKAGFSEGLLTQLQNESKVSR |
| | EDVGMLSSNSLNQAFARLWGIAGKVGDSNRQSGRYRTWTGHSVRVGGAIELFKAGYSLEKITEMGNWSDP |
| | KMVFRYIRGYLASEKAMVSFMRNHLDDL |
| 1707 | WP_004197571.1 |
| | MTDKTKLVAISRTDDMSALDALKLLRFRRYNTARSQLRVTSVWSAWCARHGLTPFPVTAVDVERYINGLN |
| | GSVKMATISHFIACLSSVNSSLGFPDFRNVLIKALVQVWRARENEKKIVTGQALPFLISDLNILRRSLHK |
| | SDDLRDIRDLAMIWVGFETLLRNVEIRRIKTGDLKWQNDTSCYLLDVMRTKTSLSSNLTFQLSPQCSQHV |
| | RRLIETVEYTDTETFGHRFLFQPVNIHTNRYFPSTSSKLSRGKSIDRMLVKAGFSQGLLTQLQNESKVSR |
| | EDVGMLSSNSLNQAFARLWGIAGKVGDSNRQSGRYRTWTGHSVRVGGAIELFKAGYSLEKITEMGNWSDP |
| | KMVFRYIRGYLASEKAMVSFMRNHLDDI |
| 1708 | WP_087728582.1 |
| | MTDKTKLVAISRTDDMSALDALKLLRFRRYNTARSQLRVTSVWSAWCARHGLTPFPVTAVDVERYINGLN |
| | GSVKMATISHFIACLSSVNSSLGFPDFRNVLIKALVQVWRARENEKKIVTGQALPFLISDLNILRRSLHK |
| | SDDLRDIRDLAMIWVGFETLLRNVEIRRIKTGDLKWQNDTSCYLLDVMRTKTSLSSNLTFQLSPQCSQHV |
| | RRLIETVEYTDTETFGHRFLFQPVNIHTNRYFPSTSSKLSRGKSIDRMLVKAGFSEGLLTQLQNESKVSR |
| | EDVGMLSSNSLKQAFARLWGIAGKVGDSNRQSGRYRTWTGHSVRVGGAIELFKAGYSLEKITEMGNWSDP |
| | KMVFRYIRGYLASEKAMVSFMRNHLDDI |
| 1709 | WP_032413233.1 |
| | MTDKTKLVAISRTDDMSALDALKLLRFRRYNTARSQLRVTSVWSAWCARHGLTPFPVTAVDVERYINGLN |
| | GSVKMATISHFIACLSSVNSSLGFPDFRNVLIKALVQVWRARENEKKIVTGQALPFLISDLNILRRSLHK |
| | SDDLRDIRDLAMIWVGFETLLRNVEIRRIKTGDLKWQNDTSCYLLDVMRTKTSLSSNLTFQLSPQCSQHV |
| | RRLIETVEYTDTETFGHRFLFQPVNIHTNRYFPSTSSKLSRGKSIDRMLVKAGFSEGLLTQLQNESKVSR |
| | EDVGMLSSNSLNQAFARLWGIAGKVGDSNRQSGRYRTWTGHSVRVGGAIELFKAGYSLEKITEMGNWSDP |
| | KMVFRYIRGYLASEKAMVSFMRNHLDDL |
| 1710 | WP_096903742.1 |
| | MTDKTKLVAIARTDDMSALEALKLLRFRRYNTARSQLRVTSVWSAWCARHGLTPFPVTAVDVERYINGLN |
| | GSVKMATISHFIACLSSVNSSLGFPDFRNVLIKALVQVWRARENEKKIVTGQALPFLISDLNILRRSLHK |
| | SDDLRDIRDLAMIWVGFETLLRNVEIRRIKTGDLKWQNDTSCYLLDVMRTKTSLSSNLTFQLSPQCSQHV |
| | RRLIETVEYTDTETFGHRFLFQPVNIHTNRYFPSTSSKLSRGKSIDRMLVKAGFSEGLLTQLQNESKVSR |
| | EDVGMLSSNSLNQAFARLWGIAGKVSDSNRQSGRYRTWTGHSVRVGGAIELFKAGYSLEKITEMGNWSDP |
| | KMVFRYIRGYLASEKAMVSFMRNHLDDI |
| 1711 | WP_130953238.1 |
| | MTDKTKLVAISRTDDMSALDALKLLRFRRYNTARSQLRVTSVWSAWCARHGLTPFPVTAVDVERYINGLN |
| | GSVKMATISHFIACLSSVNSSLGFPDFRNVLIKALVQVWRARENEKKIVTGQALPFLISDLNILRRSLHK |
| | SDDLRDKRDLAMIWVGFETLLRNVEIRRIKTGDLKWQNDTSCYLLDVMRTKTSLSSNLTFQLSPQCSQHV |
| | RRLIETVEYTDTETFGHRFLFQPVNIHTNRYFPSTSSKLSRGKSIDRMLVKAGFSEGLLTQLQNESKVSR |
| | EDVGMLSSNSLNQAFARLWGIAGKVGDSNRQSGRYRTWTGHSVRVGGAIELFKAGYSLEKITEMGNWSDP |
| | KMVFRYIRGYLASEKAMVSFMRNHLDDI |
| 1712 | VGI65087.1 |
| | MTDKTKLVAISRTDDMSALDALKLLRFRRYNTARSQLRVTSVWSAWCARHGLTPFPVTAVDVERYINGLN |
| | GSVKMATISHFIACLSSVNSSLGFPDFRNVLIKALVQVWRARENEKKTVTGQALPFLISDLNILRRSLHK |
| | SNDLRDIRDLAMIWVGFETLLRNVEIRRIKTGDLKWQNDTSCYLLDVMRTKTSLSSNLTFQLSPQCSQHV |
| | RRLIETVEYIDTETFGHRFLFQPVNIHTNRYFPSTSSKLSRGKSIDRMLVKTGFSERLLTQLQNESKVSR |
| | EDVGMLSSNSLNQAFARLWGIAGKVSDSNRQSGRYRTWTGHSVRVGGAIELFKAGYSLEKITEMGNWSDP |
| | KMVFRYIRGYLASEKAMVSFMRNHLDDI |
| 1713 | WP_085353366.1 |
| | MTDKTKLVAISRTDDMSALDALKLLRFRRYNTARSQLRVTSVWSAWCARHGLTPFPVTAVDVERYINGLN |
| | GSVKMATISHFIACLSSVNSSLGFQDFRNVLIKALVQVWRARENEKKIVTGQALPFLISDLNILRRSLHK |
| | SDDLRDIRDLAMIWVGFETLLRNVEIRRIKTGDLKWQNDTSCYLLDVMRTKTSLSSNLTFQLSPQCSQHV |
| | RRLIETVEYTDTETFGHRFLFQPVNIHTNRYFPSTSSKLSRGKSIDRMLVKAGFSEGLLTQLKNESKVSR |
| | EDVGMLSSNSLNQAFARLWGIAGKVGDSNRQSGRYRTWTGHSVRVGGAIELFKAGYSLEKITEMGNWSDP |
| | KMVFRYIRGYLASEKAMVSFMRNHLDDI |
| 1714 | WP_080922991.1 |
| | MTDKTKLVAISRTDDMSALDALKLLRFRRYHTARSQLRVTSVWSAWCARHGLTPFPVTAVDVERYINGLN |
| | GSVKMATISHFIACLSSVNSSLGFPDFRNVLIKALVQVWRARENEKKIVTGQALPFLISDLNILRRSLHK |
| | SDDLRDIRDLAMIWVGFETLLRNVEIRRIKTGDLKWQNDTSCYLLDVMRTKTSLSSNLTFQLSPQCSQHV |
| | RRLIETVEYTDTETFGHRFLFQPVNIHTNRYFPSTSSKLSRGKSIDRMLVKAGFSEGLLTQLQNESKVSR |
| | EDVGMLSSNSLNQAFARLWGIAGKVGDSNRQSGRYRTWTGHSVRVGGAIELFKAGYSLEKITEMGNWSDP |
| | KMVFRYIRGYLASEKAMVSFMRNHLDDI |
| 1715 | WP_115793642.1 |
| | MTDKTKLVAISRTDDMSALDALKLLRFRRYNTARSQLRVTSVWSAWCARHGLTPFPVTAVDVERYINGLN |
| | GSVKMATISHFIACLSSVNSSLGFPDFRNVLIKALVQVWRARENEKKIVTGQALPFLISDLNILRRSLHK |
| | SXDLRDIRDLAMIWVGFETLLRNVEIRRIKTGDLKWQNDTSCYLLDVMRTKTSLSSNLTFQLSPQCSQHV |
| | RRLIETVEYTDTETFGHRFLFQPVNIHTNRYFPSTSSKLSRGKSIDRMLVKAGFSEGLLTQLQNESKVSR |
| | EDVGMLSSNSLNQAFARLWGIAGKVGDSNRQSGRYRTWTGHSVRVGGAIELFKAGYSLEKITEMGNWSDP |
| | KMVFRYIRGYLASEKAMVSFMRNHLDDI |
| 1716 | WP_085354469.1 |
| | MTDKTKLVAISRTDDMSALDALKLLRFRRYNTARSQLRVTSVWSAWCARHGLTPFPVTAVDVERYINGLN |
| | GSVKMATISHFIACLSSVNSSLGFQDFRNVLIKALVQVWRARGNEKKNVTGQGLPFLISDLNILRRSLHK |
| | SDDLRDIRDLAMIWVGFETLLRNVEIRRIKTGDLKWQNDTSCYLLDVMRTKTSLSSNLTFQLSPQCSQHV |
| | RRLIETVEYTDTETFGHRFLFQPVNIHTNRYFPSTSSKLSRGKSIDRMLVKAGFSEGLLTQLKNESKVSR |
| | EDVGMLSSNSLNQAFARLWGIAGKVGDSNRQSGRYRTWTGHSVRVGGAIELFKAGYSLEKITEMGNWSDP |
| | KMVFRYIRGYLASEKAMVSFMRNHLDDI |
| 1717 | WP_126123982.1 |
| | MTDKTKLVAIARTDDMSALEALKLLRFRRYNTARSQLRVTSVWSAWCARHGLTPFPVTAVDVERYINGLN |
| | GSVKMATISHFIACLSSVNSSLGFPDFRNVLIKALVQVWRARENEKKIVTGQALPFLISDLNILRRSLHK |
| | SDDLRDIQDLAMIWVGFETLLRNVEIRRIKTGDLKWQNDTSCYLLDVMRTKTSLSSNLTFQLSPQCSQHV |
| | RRLIETVEYTDTETFGHRFLFQPVNIHTNRYFPSTSSKLSRGKSIDRMLVKAGFSEGLLTQLQNESKVSR |
| | EDVGMLSSNSLNQAFARLWGIAGKVSDSNRQSGRYRTWTGHSVRVGGAIELFKAGYSLEKITEMGNWSDP |
| | KMVFRYIRGYLASEKAMVSFMRNHLDDI |
| 1718 | WP_107947608.1 |
| | MSKMIRTNSNAQNNANISNERATGSDHHHNNRAEQPRFFEESFLPQSVRSDYLSAAEETEYEISVNTRRV |
| | YNTSFSVFSRYCAEHQLQALPADPRSVISFIGHQKELIQESTGVQLSKQTLTTRLAAIRYHHIQAGFHSP |
| | TEHPLVIRVMRGLSRNQSRHVSDYDQQPIMYDEVEMLIQAIDEQVQPLTRARDKAIIQLGLQGGFRRSEL |
| | ADIKVQYVSFLRNKLKVRLPYSKSNQQGQREWKDLPDHEPFAALDAVKNWLSLANIEDGHLFRSLSRDGK |
| | NLRPYQMKDRHSGSSSLLNKNSGFLTGDDIYRIIKKYCTKAGLPAKFYGAHSLRSGCVTQLHENNKDHLY |
| | IMARTGHTDPRSLRHYLKPKD |
| 1719 | WP_083915996.1 |
| | MTQLPAVSLADTYAREALSKATARAYRADWNHFLDWCESREVSGLPATVQTICDYLASMAETHARATIER |
| | RVVTIAQAHKIKGLPWVSGQPRIRATLRGMFRLHGRPQVKSAAIEVDELRAILSSMPASTVGLRDRAIFL |
| | LTFAGAMRRSEVARLRRQDVVIGKDGLRILVSRSKSDQVGEGHVLAIPRGANMATCPVEALTRWLRAAPA |
| | DDAIFRSIRADGTVLDHPLHPNSIGEIVKRCAARAGVSATSPNERISAHGLRAGCITSLYRKGVSDEAIM |
| | GHSRHRDLKTMRGYVRRGKLMTESPAKELGL |
| 1720 | YP_003856919.1 |
| | MASLRTSSRKDGSTYTSVLYRLNGKQTSTSFDDPVQAVEFKRMVEQLGAAKALEVIETTDAAARHYTLSE |
| | WLRHYLDHKTGVEKSTIYDYEKVVAKDIDPALGPIPLAALTGDDIAKWVQALADRGLKGKTISNKHGFLS |
| | SALNAAVRAGRIPGNPAAGARLPRTEKAEMVFLTREQYAKLHDNITLPWQPLVEFLVASGARWGEVVALR |
| | PSDVNRDASTVRISRASKRTYEKGSYALGAPKTLKSRRTINVDASVLGKLDYSGEYLFTNTVGNPVRHNN |
| | FHANVWQPALKRAGLDVKPRVHDLRHTCASWLIAAGVPLPAIRDHLGHESIKITVDTYGHLDRSSGQIVA |
| | AAIAAQLDPARG |
| 1721 | WP_132978117.1 |
| | MTSVDRYLEAATRTNTRRGYRSAIRHFEEVWGGFLPATADAVARYLADHAESLALNTLRLRLAALSQWHL |
| | EQGFPDPTKASVVRKVLKGIGELHPAREQQARPLQIEELARLDDWLAARIQESANHDEQAARRRATRDRA |
| | LILLGFWRAFRGDELNRLRVEHIQVIPGEGMTLYLPRTKTDHSARGSEFKVPALSRLCPVDAYLDWISLT |
| | QLTEGPVFRRINRWGAVGDEALHPNSLIPLLRKRFVEAGLAMPEHYSGHSLRRGFASWANANHWDVKSLM |
| | DYVGWKDMKSALRYIERPDAFGRERIERALAQT |
| 1722 | WP_048220040.1 |
| | MNIKRFQFNSGESYSILLDDDLLPMYYPNLFVTLYHRNRSDTANTCYKEFEHIKLFYEIMDILDIDIENR |
| | CKRGVFLERNEVEGITGLAKYHSAILKEVNFTFLNNSLKKKKPSPGKIEGARFSPVINKENLVSSKTCYN |
| | RLTTFANYIGWLENMLFHSTQADTKHLFIVLRPKRKERINIIDNHAVKVVDLLDKNGVKIPLENSDYNDD |
| | YRSLSENQLAQIFEVVKVENNRNPWQRSDVRFRNQLLIHLLSSTGMRRGEVIRIKITDLGRSTTTGRYYL |
| | LVRVGEDMEDKRINKPSAKTSGRRVPLHQNLYHMIEEYIIFHRSKITNVEKTPYLLVAHSSGRNQKGDNG |
| | LSLVSVNKICLQISVVVGFTVHPHMFRHTWNDRFSKHVENLIREGKTTEAKAESDRRKLMGWSSESEMGA |
| | RYARKYEEERAIKTGLKLQDKSYNQEDDSQ |
| 1723 | WP_002351552.1 |
| | MPTKLSNGKYKTNLRYPKKFREITGITSEKYQKVFPTRQLAIKAENAMKRKIETVLREENANSLELKGKI |
| | KFKEFYESKWLPRYELGQTTRSKRAPSYVTISNTKDIFRLHILPMFGEYAMNYLNSNTEIISDELTKKSK |
| | EYANIKIIKGYVRSMFDIAEILNYIEFNRTTKIIQCITVPKKIALEERRIREGNQALSSEELIAWIEAVN |
| | TDLNNHLLTLHDYTLFMLTLYLGDRKSETYALQWKYIDFEKQTVRLKHALDKYQKKKFTKGRKDTVIQVP |
| | EIVMALLSKWKSVQAEQLLRLKINQTPDQYLFTYTKPSGEVNCPVHADYLNYRINSIKRRHPELAHLSPH |
| | KLRHTYATIARQGGANMNQISNALTHSDISTTKIYVNTPDVVDKTVFEAFQKGLKN |
| 1724 | ORE41776.1 |
| | MSDVGRYMAAGRRKNTVRSYESGLRHYEVEWKGLLPATVDNVCQYLATYAAELSVPTLKHRLAALSKWHK |
| | ENRFTDPTKDSRVGQVLRGIKAVHPHTPQQAAALGIADLARVVQVLECAAAEANESGDRKTLLQQKRDLA |
| | FLLIGFWRGFRGNELCNLQVQNVHAERGIGLEIVVHGSKGDRANDGVTFSTPALPKLCPVGAYLDWIEAA |
| | ELKEGPVFRSISRWGVVGESALSLTNVSKLLREILERGGLDASKYSSHSLRHGFAHWAANHGWDLAETMD |
| | YVGWSDPKSALRYMPKKTPFERMANSAYSPPAIEHQSKRLK |
| 1725 | WP_012729869.1 |
| | MAALTKTPSGTWKATIRRVGWPTAAKTFRTKRDAEDWARRTEDEMVRGVFIQRAPSEKTTVADALDRYER |
| | EIVPTKKASTQRREGARIRELKANFGKYSLAAVTPDLVSRYRDDRLARGKANNTVRLELALLGHLFNVAI |
| | KEWHIGLIFNPVANIRKPSPGEGRNRRLSESEQAKLLATVDQHSNPMLGWIVRLAIETGMRQSEILGLRR |
| | GQVDLERRVVRLTDTKNNAARTVPLTKLAALVLQNALGNPVRPIDTDLVFFGEPGRDGKRRAYQFTKVWN |
| | GLKKRTGLIDFRFHDLRHEAVSRLVEAGLTDQEVASISGHKSMQMLRRYTHLRAEDLVSKLDAFASSRR |
| 1726 | WP_103422207.1 |
| | MTYPTLSNPAHQSLQTVFDAQLNSRARRFLRSAKADSTLNAYQADTRIFVFWCQLHGLDPLQTTHHDIMN |
| | FLADQADGVLADWVWLDKEEGKGELRNGEPRKPATLVRRLAGIRYAFKQKGIHPMPTEHPEIKEMMRGIV |
| | RLGDNRKRKTGALTLQPLTQVLDGIDTNDLAGLRDHTLLLLMFSGALRRSEAARIEVSDLDFVGQGIRLR |
| | LKPSKHQLHETEIALIPGKHYCPVSALQKWLHKSRISEGPLFRRMNRWGQLMAEPLGPQGINLMIKRRTG |
| | QTIDDLYVSGHSLRRGFITSAVTAGKPMNKIIEVTRHKDMRTLQEYFDDAHKFSDHALDGLL |
| 1727 | WP_085734974.1 |
| | MNYPHIQAQTQQALQSVFDPQLNSRARRFLRSAKADSTLNAYQADTRIFVFWCQLHGLDPLQTTHHDIMN |
| | FLADQADGILADWVWLDKEEGKGELRNGEPRKPATLVRRLAGIRYAFKQKGIHPMPTEHAEIKEMMRGIV |
| | RLGDNRKRKTGALTLKPLACVLDQIDTGNLAGLRDYTLLLLMFSGALRRSEAAKIEVDDLDFVGQGIRLR |
| | LKPSKHQLHETEIALVPGKQYCPVSALARWLKQSRISEGALFRRMNRWGQLMPEPLGPQGINLMIKRRTG |
| | QAIDDLQVSGHSLRRGFITSAVTAGKPMNKIIEVTRHKDIRTLQEYFDDAHKFSDHALDGLL |
| 1728 | WP_048667503.1 |
| | MSHSNLPTRKQSQVTLSHFQSTEKTLQQWEEQKEKLSRFKLNFPDLTDSFDPDWTSLPPVLTHLREFEEH |
| | RGGLSTHTLRMLAFVIRKWDVYCKSKEAYSFPIHAPVLLIWFKELKLSQNIKINTLKQYRAQLSLFHKIM |
| | NTDDITKLPVIATFFKSLPKDEMEITGSQVIELQAKPFRKHHLTHLMEVWGNKKRAVPFRDLAVLTLSYG |
| | TLLREGEVGKIRKKHIKFLENGDLNIERVTSKTTISPEPKRLTGRFSSIVKCYLDTYCTCLDDEDFVFCW |
| | LTVKGSRPAGYRQTPMSGMTIDRIYQRAHEVLLESGDIVISGDGHRDVWSGHSSRVGALQDGYHAGLSLT |
| | QLIQLGDWKSNEMVLRYLRGLDNDMSPNVLLQKK |
| 1729 | WP_076499665.1 |
| | MKKLDLKNDCIGKNPIIRIEFPYDFELKELVKQFPGCNWDIKKKVWWVSYADNRLTELITFFKGKVWLDY |
| | SQLKKVEIPKAQPVLPPLIASLEIEINKFEDWMRNKRYSESTIKTYKDAVIIFLRFLENKAIVEIENEDL |
| | EKFNKEYILARGYSSSYQNQVVNGIKLFFQNRRGIKFNPEIVYRPKREKLLPNVLSKEEVKSILDSHQNL |
| | KHRAMLCLIYSCGLRRGELLNLKIMDIDSKRNILIIRQTKGKKDRVVPLSPKIIELLREYFKAYKPTIYL |
| | FEGHKSQGKYSEKSLESVLKQALVKSGIKKPVTLHWLRHSYATHLLERGTDLRHIQELLGHNSSKTTEIY |
| | THVSIRSLQKVWSPFDDL |
| 1730 | WP_045829269.1 |
| | MKDISTIPSLAQPAASLALPIHLAQQAADAVRELLAEAAADNTTRSYASALRYWAGWHAARYGVDMTLPV |
| | PEATVLQFVVDHVVRRSSDGELVWELPPSVDQALVAAGLKAKRGPWTLATVRHRVAVLSTAHRLKHVTNP |
| | CEQPAIRTVLSRAARAAVKRGERPRKKTAITIAELEAMLATCDDSIEGLRDRALLCFGFASGGRRRSEVA |
| | AADLRDLRRIGSQGFIYRLEHSKTQQAGVTPTSTPDKPVLDRAARALEAWLAAAGIIEGAIFRRLWKQRV |
| | GPALSPAAVGEIVQRRARLAGLEGDFGGHSLRSGFVTEASRQGVALPAIMQLTEHRSVSSVIGYFQMGGA |
| | TENPAARLLEDG |
| 1731 | KJV34819.1 |
| | MREPRAALATSVDQVLTRLASWSTDFAAGSASATVKAVRSDWAQYLVWCDTSGNSPLPASVLQLEAFLVD |
| | AIDRGRKRATVDRYLYTVGLVHAAAGLPSPSKDPDWSVKWKKLTRRLKTTGGHMRKQAAELDMGGVSAIL |
| | ATLGDSPRDLRDAALLSLASDTLCRESELVAIEVAHLHLNRRRNTWSLHVPFSKTNQDGESPDFRFVSQE |
| | TIVRVRAWQATSGITEGALFRPVGGRPKLAGDASPALLPQEVARIFRRRAKAAGLEGAAAISGHSARIGS |
| | ANDLAENGATSTQIQQAGGWKTERMVTHYTRKSLAGRGAMQDLRRTDPAKTSD |
| 1732 | WP_073285721.1 |
| | MSTVPVVPPSPASTSLAHLAEQTARYVEAGLQGAPNTARAYAGDWRRFTAWCTEHGQVALPASVDTLAGF |
| | VTHLAEAGKKVATIQRHCAAISKAHALRDLASPTDDKKFKVLLEGISRVKGTRQKQAPAFSLANFKRTVK |
| | HIDASTPGGLRDRVILLLGFTGAFRRSELSALDLEDLTFSDDGLTIDLKRSKTNQLGEAEEKAIFYSPDP |
| | SLCPIRTLQAWMRMLGRTAGPVLVSLRKGGRLTERRLTDVHLNKIVQRHLGPKFTAHSLRASFVTVAKLN |
| | GADDSEVMNQTKHKTSSMIRRYTRLDNVRQHNAAQKLGL |
| 1733 | WP_125423373.1 |
| | MSTVPVVPPSPTSTGLAHLAEQTARYVEAGLQGAPNTARAYAGDWRRFSAWCTEHGQVALPASVDTLAGF |
| | VTHLAEAEKKVATIQRHCAAISKAHALRDLASPTDDKKFKVLLEGISRLKGTRQKQAPAFSLASFKRTVK |
| | HIDASTPAGLRDRVILLLGFTGAFRRSELSALDLEDLTFSDEGLTIDLKRSKTNQLGEAEEKAIFYSPDP |
| | SLCPIRTLQTWLRMLGRTTGPVLVSLRKGGRLTERRLTDVHLNKIVQRHLGPKFTAHSLRASFVTVAKLN |
| | GADDSEVMNQTKHKTSSMIRRYTRLDNVRQHNAAQKLGL |
| 1734 | WP_035560163.1 |
| | MSSVPVAPASPSSVGLAHLTEHTTRYVEAGLQGAPNTARAYAGDWRRFTTWCTAHGQVALPASVETLAGF |
| | VTHLAEAGKKVSTIQRSCAAISKAHALRDLASPTDDKKFKVLMDGISRLKGVRQKQAPAFSLASFKRTIK |
| | HIDATTPAGLRDRVILLLGFTGAFRRSELSALDLDDLTFSEDGLTINLKRSKTNQLGEAEEKAIFYSPDP |
| | TLCTIRTLQAWLRLLERTSGPILVSFRKGGRLTDRRLTDVHLNKIVQRHLGPKFTAHSLRASFVTVAKLN |
| | GADDSEVMNQTKHKTSEMIRRYTRLDNVRQHNAAQKLGL |
| 1735 | WP_111480623.1 |
| | MAHLTEHTTKYVEAGLQGAPNTARAYAGDWRRFTEWCTAHAQVALPASVDTLAGFVTHLAEAGKKVSTIQ |
| | RSCAAISKAHALRDLASPTDDKKFKVLMDGISRLKGVRQKQAPAFSLASFKRTLKHLDATTPAGLRDKVI |
| | LLLGFTGAFRRSELSALDMDDLSFSEDGLTINLKRSKTNQLGGAEEKAIFYSPDPALCPIRTLQAWLRLL |
| | ERTSGPILVSFRKGGRLTDRRLTDVHLNKIVQRHLGPKFTAHSLRASFVTVAKLNGADDSEVMNQTKHKT |
| | SEMIRRYTRLDNVRQHNAAQKLGL |
| 1736 | WP_125440609.1 |
| | MAHLTEHTTRYVEAGLQGAPNTARAYAGDWRRFTEWCTTHGQVALPASVETLAGFVTHLAETGKKVSTIQ |
| | RSCAAISKAHALRDLASPTDDKKFKVLMEGISRLKGVRQKQAPAFSLASFKRTLKHLDASTPAGLRDKVI |
| | LLLGFTGAFRRSELSALDLDDLTFSEEGLTINLKRSKTNQLGQAEEKAIFYSPDPALCPIRTLQAWLRLL |
| | ERTSGPILVSFRKGSRLTDRRLTDVHLNKIVQRHLGPKFTAHSLRASFVTVAKLNGADDSEVMNQTKHKT |
| | SEMIRRYTRLDNVRQHNAAQKLGL |
| 1737 | WP_065235645.1 |
| | MRKALMEHALNLLNDKNDKNRKFGVDKVFHPLDVHFDTNSLSAWLSFYFQVHVKGAPEKTVQAKQKDLSK |
| | FLNFFQVEVGHDQVDNWTPAVSKQFQRSLCNTISEKTGKAYKATSINRTMATIRHAGRWLYQQRPLIAGD |
| | PLSGVKDLQTDAPEWNGLNSKQLMRLKAACEQRAKICTRKNQNALLETAVFYVLLGTGLRESELVSLNVH |
| | QYHSKGLHSVVRHKSKRVTTKIPLPQESREHLEHYLKSRVSEPDEPLFINRAGNRINTRNIFRICQRVLK |
| | QVLALLPENERFEFTPHKLRHTFLKKVTDKHGVHFAQELSGNVSIKEIFRYAKPSQDEMQETIEELFES |
| 1738 | WP_009408153.1 |
| | MVTFWLAGAGKSTLKLVVSSWGYEYPQMSGVRASDDPDSPMPGKENVPQAHKREAKARHARIIQLTELQL |
| | ATGLRASEARQITWADVTQDDHGVVWVTVRPEISKTKVGRTIPVLVPEVGKRLLARKGKDEELVIPQPNS |
| | GKPWDKAGVHKAVRDYYEGVAGTSEDLAFLKKIRSHAWRGALNTITAPHLRPDIRAAYFGHTEKVNARAY |
| | TDHVNVRPMMKAVEALTQRE |
| 1739 | WP_133288865.1 |
| | MATDGQDTEAGPGAGGANPPAQGRGSSTPPAPAAVPAVSGEPSEGTAAALPAAGREALDEALRYARAALS |
| | DNTRLAYAVDWQDFAAWCTAAGLAPLPAAAETVAAYLAALARTHAIATLRRRLVSIAKAHRVAGHTGFWA |
| | AHPVISETLRGITRTRGRPQRRAAALTTPDIRRLVATCGPDLAGLRDRALLLLGYAAALRRAELIAVEVE |
| | HLKFDAQGLRLHIPRSKGDQAGEGEELGIPRGQRRDTCPVRAIEAWMVASEAQYGPLFRKVNRWGGLEPG |
| | RLHPSSVRQILLRRAEQAGIAGTALEPISPHGLRAGFVTQAYKAGLRDEEIMQHSRHRDLRTMRRYVRRA |
| | KLLEDSPAKRLDL |
| 1740 | WP_011415080.1 |
| | MSDISPPSALPGSALAALETDLALALRAPNVAVDRELLAAYVEAAAPNSIRALRQDVEAFDLWCRRSDAR |
| | AFPATPGMVADWLKHRASEGAAPASLVRYKASIAKAHRLLDLDDPTKHEICRLAIAAHRRNVGSRQKQAR |
| | PLRFRGAVKDPVQATPRGIHIRAILGACDNTPTGLRNRALLSVAYDTGLRASELVAVAAEDIVEALDPDA |
| | RLLRIGRHKGDQEGEGSTAYLSPRSVQALQAWLHAADISEGPVFRRVIVRRYADRPARRRIDPNTISGRA |
| | IWDPRKFAAKAAVAARTEYNVGEKALHPGSVTPIVRGMIASAIDAGAFGDLDKEQARKLVAGFSAHSTRV |
| | GLNQDLFAIGETLAGIMDALRWKSPKMPLAYNRNLAAEAGAAGRLLSKLD |
| 1741 | YP_239821.1 |
| | MKTRCYDGKKWQYEFKHEGKRYRKKGFRTKREANSAGLDKLNELRQGFNFENNLTFEDYFKNWIETYKEN |
| | IVSENTFRHYRFTLKHIQRHKIGKVEISKINKQMYQKFINDFSENRAKETIRKTNGAIKSALEDAVYDGL |
| | IAKNPTYKITFKAGKTTKSEEEKYISLEEYKALKEYLKDKSSKSALALYIMICTGCRVSGVRSMKLEYIN |
| | EFRSELYIDEHKTDSSPRYVAVGKNDLRHIINVIKNSTISYDGYIFKDSGKLISINAINKTLKKACESLG |
| | INYITSHALRHTHCSYLLAKDISIYYISKRLGHKNISITTSIYSHLLEEKFSEEEQKTKNILDAM |
| 1742 | WP_018621639.1 |
| | METGESLPAVYSQITTDGQRLPGLNEQQQKAREFYESGLYGAPNSKKAYQSDVKQYLAWYHHKGYEALPS |
| | TSQALAEYMTELSTDKGYFTLQRRLASIAKYHRIHNLPSPTIHEQFKLFMKGVRREKTIRQKQAMAFTLD |
| | EFRQAVDSQPLTPTGLRNRLILLLGFTGAFRRQELVDINVENLECRSDGILITINHSKTNQDGVEEAKFV |
| | AKAKQEAYCPLRTLQQWLTLIGRAEGPLFVRIRKGERPTLDRLSDDYVNLLTKAAFGQYYSAHSMRASFV |
| | TISKDAGVDNRKIQNQTKHKTTOMIDRYDRRRDVIYQNASTELDL |
| 1743 | WP_026242320.1 |
| | MQNPPANMPEIADDHRDGDLPDSVDLVTETGASASPASARVEALVATATAYANAASSENTRSAYAKDFSH |
| | FTAWCRREGFEPLPPSSQVIGLYIGACASGSVVDTAAGKPKRTAPALSVATIERRLSGLAWNFTQRGMPM |
| | DRSDRHIATVLAGIRRKHGTPPRQKEAVLGEDIRAMINTLGHDLRGLRDRAILLLGFAGGLRRSEIVGLD |
| | IARDDKSDGHGWIEIFPDQGVLVTLRGKTGWRQVEVGRGASSETCPVAALESWIRFGRIARGPLFRRIFK |
| | DNKTVDVERLSDKHVARLVKQTALAAGVRSDLPEGERALLFSGHSLRAGLASSADIEERYVQKQLGHASA |
| | EMTRKYQRRRDRFRTNLTKASGL |
| 1744 | AVC45611.1 |
| | MPEIADDHRDGDLPDSVDLVTETGASASPASARVEALVATATAYANAASSENTRSAYAKDFSHFTAWCRR |
| | EGFEPLPPSSQVIGLYIGACASGSVVDTAAGKPKRTAPALSVATIERRLSGLAWNFTQRGMPMDRSDRHI |
| | ATVLAGIRRKHGTPPRQKEAVLGEDIRAMINTLGHDLRGLRDRAILLLGFAGGLRRSEIVGLDIARDDKS |
| | DGHGWIEIFPDQGVLVTLRGKTGWRQVEVGRGASSETCPVAALESWIRFGRIARGPLFRRIFKDNKTVDV |
| | ERLSDKHVARLVKQTALAAGVRSDLPEGERALLFSGHSLRAGLASSADIEERYVQKQLGHASAEMTRKYQ |
| | RRRDRFRTNLTKASGL |
| 1745 | WP_015494605.1 |
| | MLSHLVPLSRTGVKYPNVRQQGRSSIDPLEEKKTRRIEPTVADLASDWLDVHASGLKSEQAIRSLIGGDL |
| | VKAIGRMKVTDVRRRDVIEAVEAKATTAPRQAALMLSYARMLLDYATDRDIVRANPVAGLKPASIKVAGK |
| | RDPLKPVVRLRVLDAEEIKSMWVNVESCGLHLLTGLALKLVLVTGQRPGEVAGMHENEISGRLWTIPASR |
| | RGKTSTTQTVYLTDTALNIITVAKAELERLQGRRKGALSGYIFEAKGGSSITNSALPRGVQRSHEALGVK |
| | DNETWGHWTPHDLRRTMRTGLSACKIAPHIAELTIGHTKRGIVATYDQHTFDSERRDAMMAWELRLMTIV |
| | AGNNPDAIVDNVLKLEAKA |
| 1746 | WP_005610302.1 |
| | MPPKSHSQLNNEEPSTSEFSQDLSENTRKAYATDWALYMQWCRMQGIPPLSATPDHIARYLTEISASSGL |
| | SSASVRRRLAGLVWNYHQRGFRLDRNSPLIADALSEITTNEQCATVIKDAITPQEIRAMVATLPFDLRGL |
| | RDRAILLTGYIGGLGRSDLIGLDLHQYDTEGGTGWIELHSEGILLTIRSKTGWRKVQIACGNTDLTCPVY |
| | TLTKWLHFAKIRSGPAFVRTSRDDKRALSTRLNDRHIPRLVKSTILKAGIRAELPEKERLALFSGHSLKK |
| | GLSVSVDQSSGNQIEVNLTKAAGF |
| 1747 | WP_093220183.1 |
| | MTELDRYLQAATRDNTRRSYRAAIEHFEVTWGGFLPATADSVARYLVAHAGVLSINTLKLRLSALAQWHN |
| | SQGFADPTKAPVVRKVFKGIRALHPAQEKQAEPLQLQHLEQVVGRLEQEIQAAKAQADRPGLLRARRDLA |
| | LILLGFWRGFRSDELCRLQIEHVQAVAGSGITLYLPRSKSDRENLGKTFQTPALQRLCPVQAYIDWITEA |
| | ALVRGPVFRGIDRWGHLGEEGLHANSVIPLLRQALGRAGIAAEQYTSHSLRRGFATWAHQSGWDMKSLMG |
| | YVGWKDMKSAMRYIDASPFAGMALSAEKPVAAQIPNSSINTVG |
| 1748 | WP_065540814.1 |
| | MRRDIITRAMIEEFQNYLWEHEKAKLTIQKYISEIENLKEFLQGQPIGKSRLLEYRGQLQERYKARTVNA |
| | KLSAINAYLVFSGMEACKVKLLKIQHCSFIEENKELSEAEYRRLLSSAGKLKNKRMYYLLLTFGGTGIRV |
| | SELPFITVEAVRTGRADINLKGKNRTVILPKKLTDKLSRYAKEQGIHTGAVFCTSSGKKLDRSNICHDMK |
| | KLCKEANVDVHKVSPHNFRHLFARCFYAVHKNLAHLADILGHSSVETTRIYVQTSIREHERIISKMKLVV |
| 1749 | WP_044543906.1 |
| | MTPEPRALNDDESRYPGWFLAFMADRAVRKPSPHTLKAYRQDFIAIATQLAAAPDRVAYLTPDAITRDAM |
| | QAAFAAYADTHEAASIRRCWSNWNTLCDFLYTDDLITANPMPLIGRPKVPKSLPKGLGAETVSGLLEAIE |
| | ADSGSQRRSNWPERDAALVLTAVLAGLRADELLHADVGDIRATTEGGGVIQVRGKGNKDRRIPVEQGLIK |
| | VLECYLDSRAVRFPADTKRRGPSAGIGAWPATAALFVGSDGHRITRGVLQYRVLRAFKNAGLNGQRAAGA |
| | LVHALRHTFATELANSDVNVYMLMKLLGHESMVTSQRYVDGAGTQNRAAAAQNPLYGLIKQSREP |
| 1750 | WP_034396620.1 |
| | MDSSKPSPFPVPVIFDANRLQIQDVLESALAPKAHEAIKELMHEGESSNTRSSYQSAMRYWAAWHLLRLG |
| | QPMQLPLRASTVLQFIIDHAQRQSGAGLLHEMPPEIDEALVAAGYKGKKGAPSHSTLVHRMAVMSKAHQV |
| | HAMPNPCQDGAVKELMSRTRKAYARRGELPQKKEALTRDVLEELLASCDDSLRGLRDRALLLFAWASGGR |
| | RRSEVAGADMRFLRTVANGEFIYTLSHSKTNQSGTDAPENHKPVTGRAAIALKAWLDGARITEGPIFRRI |
| | RKGGHVAEPLTPAAVRNIVKERCALAGVEGDFSAHSLRSGFVTEAGRRNLPLADTMALTGHHSVNTVLGY |
| | FRADSALNNQAARMLDED |
| 1751 | WP_048444547.1 |
| | MDLDRADPTPESPLEALALPVPPAAGLPPTDEILIERLEGHARAAHGAFADNTVRAFAADSRIFAAWCRE |
| | AGRTMLPATPETIAAFIDAQAETKSRATVERYRSSIAALHRAAGLANPCADEIVRLAVKRMNRAKGRRQK |
| | QAEPLNRTSIDRMIAVKAVERLHRRVSEGEHGAPLIALRNIALVAVAYDTLLRRSELVSLSIEDLERGAD |
| | GSGTVLVRRSKADQEGEGAIKYLAPDTMAHVEAWLAAAGLESGPLFRPLTKSGKVGARALGDRDVARIYR |
| | ALASAAGLKIPRLPSGHSTRVGATQDMFAAGFELLEVMQAGSWKTPAMPARYGERLRAQRGAARKLATLQ |
| | NRA |
| 1752 | WP_003499734.1 |
| | MTTYVITAEMEILFGEYLEQDEKSKNTIEKYRRDLRKFVEYIDGEEVTKELVIGFKEYLVEHYAVNSVNS |
| | IIASLNRFMQFAGWQEFRVKQLKKQRQVYCPEEKELTKQEYFELIRTAKREGKEKIGLIIQTIGSTGIRI |
| | SELPSITVQAVKNGVAQVDCKGKNRQVLLPRKLLVKLMHYIRKEHIQCGPIFITKQGNPLDRSNIWKEMK |
| | KICRLAGVNEKKVFPHNLRHLFAYSFYQMEKDIAKLADLLGHSNINTTRIYIVSSGVEHRKQIEKMNLLL |
| 1753 | WP_001066953.1 |
| | MNNVIPLQNSPERVSLLPIAPGVDFATALSLRRMATSTGATPAYLLAPEVSALLFYMPDQRHHMLFATLW |
| | NTGMRIGEARMLTPESFDLNGVRPFVRILSEKVRARRGRPPKDEVRLVPLTDISYVRQMESWMITTRPRR |
| | REPLWAVTDETMRNWLKQAVRRAEADGVHFSIPVTPHTFRHSYIMHMLYHRQPRKVIQALAGHRDPRSME |
| | VYTRVFALDMAATLAVPFTGDGRDAAEILRTLPPLR |
| 1754 | WP_001066942.1 |
| | MNNVIPLQNSPERVSLLPIAPGVDFATALSLRRMATSTGATPAYLLAPEVSALLFYMPDQRHHMLFATLW |
| | NTGMRIGEARMLTPESFDLDGVRPFVRILSEKVRARRGRPPKDEVRLVPLTDISYVRQMESWMITTRPRR |
| | REPLWAVTDETMRNWLKQAVRRAEADGVHFSIPVTPHTFRHSYIMHMLYHRQPRKVIQALAGHRDPRSME |
| | VYTRVFALDMAATLAVPFTGDGRDAAEILRTLPPLR |
| 1755 | WP_015469749.1 |
| | MDHSLWIDFFDDLQNVRGRSKNTVMAYRRDLELYKKFTEKSKRVIEFFDFMKKEGLSTRSQARVISSVRT |
| | YLKFCESKGMKCPDLRELRPPKVKTGLPKAVSVEEFEKLFRACAVEGEARTARNQLTLLFLYGLGCRVSE |
| | LIGLSLHDFSPTERWVKVLGKGSKERLIPLTDTLYNALEEYLKNHRSELMMDNKSNAALLLNDRGHRPSR |
| | VDIWRWLASWSAKAGFDEPVHPHRFRHGCATALLEGGADLRSIQVMLGHASIQTTQVYTAVTTNTATKAI |
| | DEHHPLSKIKDFSG |
| 1756 | WP_012187369.1 |
| | MEETPEIQPPDAEKSTSAPSDSNNQAQRDERDQVSTDPIALPAHVAGSGTLDRLVDTARDYARASTAENT |
| | NKAYAADWKHFARWCRLKGTDPLPPSPEMIGLYLTDLAAPAKGTPALSVSTIERRLSGLAWNYAQRGFSL |
| | DRKDRHIANVLAGIKRRHARPPVQKEAILPEDILAMVATLPFDLRGLRDRAILLIGFAGGLRRSEVVSLD |
| | VSKDDTPDSSGWIDVFEDGAVLTLNAKTGWREVEIGRGSSEQTCPVHALEQWLHFAKIDFGPVFTRTSRD |
| | GKRAMDERLNDKHVARLIKKTVLKSGIRAELPENERLALFSGHSLRAGLASSAEVDERFVQKQLGHASAE |
| | MTRRYQRRRDRFRVNLTKAAGL |
| 1757 | WP_056515134.1 |
| | MATFRQRKDSWRVEVSVKGVRDSGTFDTKTQAKAWAAKRETELRDQANGKLPSFTLQNAIDRYVREVSIN |
| | KKAHYKEIARIKVFCKSYPNLCKKQISKITTDDLVQWRDSRLKEVQGATVRREATILSGIFTVAKKEWKW |
| | IYESPLTDLSMPPIAKSRDRRVTQDEIDRLCLAAMWDESTPTTSTQQTIIAFLLALETAMRAGEILTLTW |
| | DRVFLEERYVALDETKNGTKRNVPLSKRAVELIVHLKPLDKTMVFTCKRSSFSALWIDLKKKCKIEDLHF |
| | HDSRHEACTRLARKLDVLDLARMIGHKDLKSLMVYYNATATEIAHRLD |
| 1758 | WP_051472036.1 |
| | MADAETTPDLDVEVVDALPTVVPSHLPGELQDLLDAAREYADAATAPNTVKAYQSDWRGFTAWCAQHRLQ |
| | PLPADSMTVALYLTAMAKNGRKVTTIRRHTAAIARAHRDNGLPNPMWDPTAALVLEGIARTHRSAPKKKV |
| | ALLRDPMVQLIDRIETDTPAGLRDRALLLLGFALGLRRSELVQILIEDLSPNADGLTIRLATSKTDQTGH |
| | GHEFLLPYAEPGRPCPVRAIRAWLDHTGLTHGPLIRRLHRNGIPGEALSPQSVALIVKRRAKAAGLNPAD |
| | FAGHSLRAGFATQASRDGHRTEQITDVTRHRDRRTLDGYVRAGKGAEDVARVL |
| 1759 | WP_016391764.1 |
| | MGAQATRLSDLKVKAAKPKEKDYTLTDGNGLQMRVRINGSKLWNFNYIHPVTKKRINMGLGTFPEVSLAQ |
| | ARKRTVEAREIVAQGLDPKEQRDAERQAKKAATEHTFENVTTAWFELKKDSVTPAYAEDIWRSLTLHIFP |
| | DLGTTPISAINAPKVIDLLRPLETKGSLETVKRLTQRLNEVMTYGVNSGLIHANPLSGIRSVFKKPKKKN |
| | MAALPPDELKELMVAIANASIKRTTRCLIEWQLHTMTRPAEAATTRWADIDIEKKVWTIPAERMKKRRIH |
| | IVPLTDQALDLLEAIKPYSGHREYVFPADRNPRTHCNSQTANMALKRMGFEGRLVSHGMRSMASTILNEH |
| | AWDPELIEVALAHVDKDEVRSAYNRADYIERRRPMMKWWSEHIQEAATGNLSMSAVQNNRDRKVVSIR |
| 1760 | WP_052959163.1 |
| | MQLNTVYSYSVTEAQVYNSFDIDRASENCSAETVEYLKQCQALTGKQIISLRGDSSFDEAFMLFTRLSLL |
| | VTRRRPELGVHCILIHAMPVIGGMKVEDMNRLAINRLINALVLDGKLVQSRRVFSVIKQFLGWCEFQGI1 |
| | ESSPLATMSLNKVAGGAKPKPRERVLSDDELEKFWHMWDFAEVSESTRWAARFILCSARRPDEVLRARRD |
| | EFDLHKDVWNQGERNKSGRDHSLPISPIMRMCIDKMIDAAGDSEWLVPSPKTTAKPASKVMVAQASRRIM |
| | AKKYLSDALPEPFEIRDLRRTARSSLSRLNVDQDVARKIMNHSLEGIDRVYNRHDYMDRMIEAMLAYSDF |
| | LMEKCKINQ |
| 1761 | AGC72343.1 |
| | MTELATITTNTIQPIINLVCNAVTSDHTKRAYSRALTDFIAWHSSTGQQGFGKATVQAHVTALRDAGVSA |
| | SSINQRLTAIRKLAVELADNEVIDHSAAQAVGRVEGVRKEGKRLGNWLTKEQAQQLLTLQPIATVKGLRD |
| | RAILAVLLGCGLRREECTGLAVGNIQQREGRWVIVDLVGKRSKTRSVPMPAWCKYAIDAYLLAAAVTDGV |
| | LFRSVRRGDHITGQGMTAQAIFDVVKDYAKEIGVDVRPHDLRRTFAKLAHKGNAPIEQIQLSLGHSSVQT |
| | TERYIGVQQDLSSAPCDALGLRI |
| 1762 | WP_117316704.1 |
| | MSYLATSPIDGFVSVYKEAVNKYFKDIFTKLPHNTQRAYVSDFNEFAIFCEQEGLTGFNDSMQNNEDCIK |
| | RYVEVLCHSPLAYRTIKRRLSALSKFLGIAQLPNPIVNSVYLKDFVKLSLSQNEKYQLSSHQAVPLTVDI |
| | LEKINNNVIPDTLLEMRDLAIINLMFDGLLRADEVVRVRTEHINKRNNALLVLTSKSDQTGKGSYRFISN |
| | STVAMIDEYINEANYNKALQQERDSSDPRRINHGILFRRVSNRGHALLPYDEQLKGKHSPILEYSSIYRV |
| | WKRIADMAKVKENITPHSGRVGGAVSLAENGATLPEMQLAGGWHSPEMPGHYGQQAAVGKGGMAKLAQLK |
| | GR |
| 1763 | WP_020744756.1 |
| | MNTKPPKMATDLALRNEESNQIAHRESESLRHYLQAATSDNTRKAYRSAIRQFEKWGGRLPTDRDTVVRY |
| | LLARAESLNARTLDLHLTAISQWHHYQGVTDPVRDPLVRKTMEGIRRTHGQPKRKAKALRLEHIAQMVDY |
| | LRCLPDSKKKHRDIALVLTGFFGAFRRSELVAIQISDLNWEPEGLIIRLPRSKTDQQAAGLARALPFGTP |
| | GCCPATAIKAWMDSAEIDSGPLFRPANRWDQVTPRPLNPGAINDLLKTLGKACQFDFVPELSSHSFRRGL |
| | STSAARERVDFELIKKQGGWKSDATVWEYIEEGQQLSNNASLILMEKLVTLIDPV |
| 1764 | WP_017437096.1 |
| | MENSKIALQLFIEYLQIEKNYSQYTIVCYRQDIEQFFEFMNEQGIQHLHEVTYSDVRLYLTKLYGQKQSS |
| | RSISRKMSSLRSFYKFLLRERKVKENPFALAALPKKEQKIPNFLYPQELECLFHVNDVNTAIGQRNQALL |
| | ELLYATGVRISECCHIQLSDIDFSVSTILIHGKGSKQRYVPFGRFAKEALERYIRQGRRELLENAKTEHA |
| | YLFVNARGNPLTPRGARYILDEIVKKAALTQHISPHVLRHTFATHLLNEGADMRTVQELLGHAHLSSTQV |
| | YTHVTKDRLRHIYLHTHPRA |
| 1765 | WP_054292066.1 |
| | MRIVGGYRYQDHVLLLLDAQDAFFLARKPRKDSPHTTAAYRRDLSGITTLLAGTTGRPVEHLTIQDLTVQ |
| | ALRTAFGDFADGHAKSSVARAWSTWNQFLNFCVADGMLDGNPMGAVVRPKAPLPSPKPLRGEDTPERLIA |
| | AAAAGARKARDPWPERDVLVIALGLVAGLRSAEVRALQRCSIVGRPGEQRLHVQGKANRERSIPIEAPLE |
| | RVIGAYLASCEVRFPHQRFGPVSALLLDYQGKPIGRGALDYLVKTSYQWAGIRDQVPTGANLHALRHTFA |
| | TRLAEDGANAAEIMALLGHANLNTSQNYIEATGRERRAAAAGNRTYRALSGLEPGTTSPDS |
| 1766 | WP_012862144.1 |
| | MENKTVAMEFLDYLRYEKGSSENTLSSYKRDLNLFFSEVPKNFQSIEDEEVIEYVDKLSKTVKRNTVLRK |
| | IASIRAFYKFCYINKYITDNPTESLKNLKREFKLPEVLKLSEIKDIIDAIPNTPEGVRDKIIIKILVATG |
| | ARISEVLTLDIKDVENQDYEFIRVLGKGSKYRLIPIYSQLEEEIKAYIENDRKILVLERKEKESENKNKK |
| | KGHELEYKLFLGTRRENFWKRLKKYAKNAKIEKNVYPHIFRHSVATMLINNGADIRIVQEILGHVNISTT |
| | EIYTHVGKRELKEIYNKVKIGDEE |
| 1767 | WP_022684352.1 |
| | MGTDTAREERESVVAAAETALTPIAPFGDLPWAIVQMRAVEPIVVNEALIAAYQAASSPHSVRALRSDIE |
| | AFDAWCRRTQRIALPATPEMVADYLDARAGEGAKPASLGRYKASIAKVHQLLELKDPTQAPLVKLRLAAI |
| | RRRTGTAQKQARPLRFKGPVKDVERDQARGLNIRALLEACGDDLPGLRDRALLSAAYDTGLRASELVAVA |
| | VEHIVDALDPEARLLEIPRSKADQEGEGATAFISPRSVRAIAAWRAASGIAAGPLFRRVQVRRYKARLAD |
| | PGRPIASISGREAWDLRKTLPKRAMAARVEYDVGEAALHPGSIGPIWRRIIQRAFDRGALGDLTADDLVR |
| | LLKGISAHSTRVGLNQDLFASGEGLTGIMDALRWKSPRMPLAYNRNLAAEQGAAGRLMAKLG |
| 1768 | WP_076797908.1 |
| | MASIWERKKADGSTSFTVRWRNPKTRKQEGITFSTAAEAQTLKRLLDANDQSFEIAQHAMVKNQTKAPTV |
| | AAVIQEHIDLLVRPSVGTVHTYQTMLKLHIADVIGHIPVDKLDYRHVTHWIKSMQAKGRSPKTIKNNHAL |
| | IYGAMETAVMLRYRKDNPCQRVQLPSSEKAEDEARFLTHAEFGLILECMGERYKAFTEFLVMTGLRFGEA |
| | TAVTVGDIDLMSKPATMRINKAWKRGTNSEFYIGATKTGAGKRTVSLNPQLVEILVPLVASRPGSDLLFT |
| | TPKGERIIHKLYWHHYWVPAVAAAQARGLKKSPRIHDLRHTHASWLIQDGVSLFTVSRRLGHASTRTTEQ |
| | VYGHLMPQALQDAADAVERSAVIWRS |
| 1769 | WP_097452609.1 |
| | MGELVIPGGSGGFLRDIGTEYQEAAKNFMQFMNDQGAYAPNTLRDLRLVFHSWARWCNSRQRPWFPITPE |
| | MAREYLLQLHEADLASTTIDKHYAMLNMLLSQCGLPPLSDDKSVSLAMRRIRREAATEKGERTGQAIPLR |
| | WDDLKLLDVLLSRSERLVDLRNRAFLFVAYNTLMRMSEISRIRVGDLDQTGDTVTLHISHTKTITTAAGL |
| | DKVLSRCTTAVLNDWLEVSGLREHPDAVLFPPIHRSNKARITTTPLTAPAMEKIFSDAWGLLNKRDATPN |
| | KGRYRTWTGHSARVGAAIDMAEKQVSMVEIMQEGTWKKPETLMRYLRRSGASVGANSRLMDS |
| 1770 | WP_016262425.1 |
| | MGELVISGGSGGFLRDIGTEYQEAAKNFMQFMNDQGAYAPNTLRDLRLVFHSWARWCNSRQHPWFPITPE |
| | MAREYLLQLHEADLASTTIDKHYAMLNMLLSQCGLPPLSDDKSVSLAMRRIRREAATEKGERTGQAIPLR |
| | WDDLKLLDVLLSRSERLVDLRNRAFLFVAYNTLMRMSEISRIRVGDLDQTGDTVTLHISHTKTITTAAGL |
| | DKVLSRYTTAVLNDWLEVSGLREHPDAVLFPPIHRSNKARITTTPLTAPAMEKIFSDAWGLLNKRDATPN |
| | KGRYRTWTGHSARVGAAIDMAEKQVSMVEIMQEGTWKKPETLMRYLRRSGASVGANSRLMDS |
| 1771 | WP_077543356.1 |
| | MGELVISGGSGGFLRDIGTEYQEAAKNFMQFMNDQGAYAPNTLRDLRLVFHSWARWCNSRQRPWFPITPE |
| | MAREYLLQLHEADLASTTIDKHYAMLNMLLSQCGLPPLSDDKSVSLAMRRIRREAATEKGERTGQAIPLR |
| | WDDLKLLDVLLSRSERLVDLRNRAFLFVAYNTLMRMSEISRIRVGDLVQTGDTVTLHISHTKTITTAAGL |
| | DKVLSRYTTAVLNDWLEVSGLREHPDAVLFPPIHRSNKARITTTPLTAPAMEKIFSDAWGLLNKRDATPN |
| | KGRYRTWTGHSARVGAAIDMAEKQVSMVEIMQEGTWKKPETLMRYLRRSGASVGANSRLMDS |
| 1772 | WP_032152854.1 |
| | MGELVISGGSGGFLRDIGTEYQEAAKNFMQFMNDQGAYAPNTLRDLRLVFHSWARWCNSRQRPWFPITPE |
| | MAREYLLQLHEADLASTTIDKHYAMLNMLLSQCGLPPLSDDKSVSLAMRRIRREAATEKGERTGQAIPLR |
| | WDDLKLLDVLLSRSERLVDLRNRAFLFVAYNTLMRMSEISRIRVGDLDQRGDTVTLHISHTKTITTAAGL |
| | DKVLSRYTTAVLNDWLEVSGLREHPDAVLFPPIHRSNKARITTTPLTAPAMEKIFSDAWGLLNKRDATPN |
| | KGRYRTWTGHSARVGAAIDMAEKQVSMVEIMQEGTWKKPETLMRYLRRSGASVGANSRLMDS |
| 1773 | WP_013160348.1 |
| | MAGKRAFGQIDRLPSGNYRARYVGPDLVLHKAPHTFTNKSHAERWLLDEQDLISRDVWEAPEVRTAKPRA |
| | LTVGEWISKVIERRANRTRRPLAQTTIDLYRKDYRLRISETLCAVRLADLTPAMVATWWHALPDTPTQNA |
| | RAYALLRSAMSDAMEDELIERDPCRLKEAGKPTPAHTGEAITVPELFTYLEAVPESRRLPLMIAALCGLR |
| | SGEVRGLRRRDVDLKAGMLHVEQAVSRVRADNHRWEWRIAPPKTAAGVRTVALPSPVTDALRTWLKEAPV |
| | NGWDGLLFPATDGHSPMPGTVLRDAHVKGREAIGRQTLTIHDLRRTAATLAAQGGATTKELMRLLGHTTV |
| | SVAMLYQVADEERDRARAQRLTQQLREGQAGQ |
| 1774 | EHJ58476.1 |
| | MTALILVPMTTDPPEPLALPSPAAAPPDPSVAQVVEDVRDLVGAGIRLDQELVAAAVRGWSNNTRRAFCS |
| | DLKVWGDWCRRHGIAPVRATQSDVAAYIRALSGIDPSAEKVRAMATIERYVSYIGRAYRMAGLADPTAGE |
| | LVTLEKKAARKKRGVRQRQARAIRFKGDIADFDSPPSGVCLAHLIKAVRRDVMGLRDEALLRVAYDVGAR |
| | RSELVAIDVDHIHGPDAGGAGALFVPTSKTDQEGEGAWAYLSPATMKAIARWREAAHIDKGPLFRRIETH |
| | FDGSIAAIGTKRLHPNSITLLYKRLVQRAFDKKLLGPMSEAEVARWVAAVSSHSLRVGVAQDNFAARESL |
| | PAIMQAYRWRDPKTVLRYGAQLAAKSGASARMAVRVGE |
| 1775 | WP_039858563.1 |
| | MTTDPPEPLALPSPAAAPPDPSVAQVVEDVRDLVGAGIRLDQELVAAAVRGWSNNTRRAFCSDLKVWGDW |
| | CRRHGIAPVRATQSDVAAYIRALSGIDPSAEKVRAMATIERYVSYIGRAYRMAGLADPTAGELVTLEKKA |
| | ARKKRGVRQRQARAIRFKGDIADFDSPPSGVCLAHLIKAVRRDVMGLRDEALLRVAYDVGARRSELVAID |
| | VDHIHGPDAGGAGALFVPTSKTDQEGEGAWAYLSPATMKAIARWREAAHIDKGPLFRRIETHFDGSIAAI |
| | GTKRLHPNSITLLYKRLVQRAFDKKLLGPMSEAEVARWVAAVSSHSLRVGVAQDNFAARESLPAIMQAYR |
| | WRDPKTVLRYGAQLAAKSGASARMAVRVGE |
| 1776 | WP-053559035.1 |
| | MPTVVQLPAGKVLTVRAAADAFLDSLRNPNTVRSYGVGVGKTAERIGEARPLGSVADDEIGEALELLWGT |
| | AAVNTWNARRAAVLSWLGWCAEYGYDSPSVPAWTKRLAVPDSETPARSKMAVDRLIARREVHLREKTLWR |
| | MLYETCARAEEILGVNIEDLDLAARRCPVKAKGARSKARRRGQAREDFVLETVYWDAGTARLLPRLLKGR |
| | TRGPVFVTHRRPGPGKVVSPRDVCPDTGLARLSYGQARALLDERTAVHGPGTGWDLHEYRHSGLTELGVQ |
| | GASLLMLMAKSRHKKPENVRRYFHPSPEAISELTSLLAPGDGRR |
| 1777 | SEC15746.1 |
| | MSSDNEQNPRMPGMIQPAAPERPSNRVAASGNDGTSALKSGKPAGDHSDLPDLIDVVLAMDEEPPSPTRR |
| | SPALPSNVDPLVETARSYARAARSEATQRAYAADWRHFASWCRRSGFQPLPADPQVVGLYLTACASANPR |
| | PTVSTLERRLSGLSQGYSQRGDRLDRKDPHIAEVFAGIRRKHGRPPAQKEALLAEDILAMLETLPHDLRG |
| | LRDRAILLVGFAGGLRRSEIVGLDAGVDQTEDGNGWAELFDKGILITLRGKTGWREVEIGRGSADRSCPV |
| | EALRTWTRLARIAHGPLFRRIRGQKTVEDSRLNDRHIARLVKRTAFDAGLRPDLPEKERERLFSGHSLRA |
| | GLASSAEVDERFVQKQLGHTSAEMTRRYQRRRDRFRVNLTRASGL |
| 1778 | WP_090330126.1 |
| | MPGMIQPAAPERPSNRVAASGNDGTSALKSGKPAGDHSDLPDLIDVVLAMDEEPPSPTRRSPALPSNVDP |
| | LVETARSYARAARSEATQRAYAADWRHFASWCRRSGFQPLPADPQVVGLYLTACASANPRPTVSTLERRL |
| | SGLSQGYSQRGDRLDRKDPHIAEVFAGIRRKHGRPPAQKEALLAEDILAMLETLPHDLRGLRDRAILLVG |
| | FAGGLRRSEIVGLDAGVDQTEDGNGWAELFDKGILITLRGKTGWREVEIGRGSADRSCPVEALRTWTRLA |
| | RIAHGPLFRRIRGQKTVEDSRLNDRHIARLVKRTAFDAGLRPDLPEKERERLFSGHSLRAGLASSAEVDE |
| | RFVQKQLGHTSAEMTRRYQRRRDRFRVNLTRASGL |
| 1779 | WP_025031421.1 |
| | MPGMIQPAAPERPSNRVAASGNDGASALKSGKPAGDHSDLPDIIDVVLAMDEETPSPTRRSHALLSNVDP |
| | LVETARSYARAARSEATQRAYAADWRHFASWCRRSGFRPLPADPQVVGLYLSACASASPRPTVSTLERRL |
| | SGLSQGYSQRGDRLDRKDPHIAEVFAGIRRKHGRPPAQKEALLAEDILAMLETLPHDLRGLRDRAILLVG |
| | FAGGLRRSEIVGLDAGVDQTEDGNGWAELFDKGILITLRGKTGWREVEIGRGSADRSCPVEALRTWIRLA |
| | RIAHGPLFRRIRGQKTVEDSRLNDRHIARLVKRTAFDAGLRPDLPEKERERLFSGHSLRAGLASSAEVDE |
| | RFVQKQLGHTSAEMTHRYQRRRDRFRVNLTRASGL |
| 1780 | WP_070174536.1 |
| | MQSPFINAVYEFMMLKRYAKRTIQSYLVWIADFIRFHKYQHPKTMGDQEVSLYLTHLSVKRNLSASTQAS |
| | ALNALVFLYNKYLLQPLSKEMEFVNSGRKPKLPTVLTISEVQQLLTNIPERQSLPVSMLYGSGLRLMECV |
| | RLRVKDIDFDYRCVRIWQGKGGKHRVVTLSDTLIAPLKTQKEKVRHLLERDCSNPEFAGVWMPHQLAKKY |
| | KSANKSLEWQYLFPASKTSIDPESALRRRHHIDEKQLQRAVRQTAQEIGLQKSVTPHTLRHSFATHLLLK |
| | GADIRTVQEQLGHSDVRTTQIYTHILQRGGSAVVSPLESI |
| 1781 | WP_039328773.1 |
| | MTELTPFSGPLIPGDADMADRLREFVQDREAFSDNTWRQLLSVMRTGSRWADEHGRRFLPMTPADLRDYL |
| | LWLQATGRASSTITTHAALISMLHRNAGLVPPNRSPVVFRAVKRIHRTAVISGERAGQAVPFRIGDLLTL |
| | DKSWCFSDRLQQLRDLAFLHVAYATLLRVSELGRLRVRDISRAPDGRIVLDVAWTKTIVMTGGLIKGLGD |
| | LSSQRLTAWLTVSGLIAEPDAFIFGPVHRTNRALPATEKPLTTRALEDIFARAWQEAGPGQDAKPNKNRY |
| | RGWSGHSTRVGAAIDMATKKYSTAQIMQEGTWKKAETVMRYIRHVDAHAGAMVEFMDKHYSGN |
| 1782 | WP_105080092.1 |
| | MDDFRPHLPVSDAQLPGQADVVAQLREFVQDREAFSDNTWRQLLSVMRICAGWAKEYGRTFLPMTPECLR |
| | DYLMWLQANGRASSTIGTHLALISMLHRNAGLTPPHASPLVFRAMKKISRTAVVSGERTGQAIPFRLTDL |
| | LTLDARWSGSDSLQHQRDLAFLHVGYSTLLRVSELGRLRVRDVSHASDGRIVLDVGWTKTIVMTGGLIKG |
| | LGALSTQRLREWLNASGLINEPDAFIFSPVHRTNRAKINTDRPLSTRSMEDIFARAWHEAGPAADVKPNK |
| | NRYRRWSGHSARVGAAIDMATNKYSTAQIMQEGTWKKAETVMRYIRHVDAHSGAMVDFMDAHVGR |
| 1783 | WP_042596186.1 |
| | MSNREKQVYQARVERHKEKMPWYIIEYIEEKTNLSPTTLYGYLIEYEIFLQWLISSHLATSDGEVVTKIH |
| | EVPIETLEHLPLKQVKRFKSYLERQGNKTKAVIRTFSALKSLFNYLTSNTEDDNGECYFYRNVMAKMEIH |
| | KEKIDAAARAKEISEVIFHNNDDIKFMRFLSNEYEOMLQETAPGKLRFFKRDRERDIAILSLILGTGLRV |
| | SEVASLTISSINFRTRYIKVIRKGDKKSSILATQTALDDVQEYLKVRANRYKCPDDEDILFVTNYKGSYA |
| | QISVNAIQKLTEKYTRAYDEKKSPHKLRHTYATNHYNENKDLVLLANQMGHNSMETTSLYTNIDDTKRRA |
| | AIERLEQRQFEDTKEK |
| 1784 | WP_113233496.1 |
| | MPKPKALPSPADPVLARAEELDALDAILPFARRDQLAALLTDEDVATLKHLAKEGMGDNTLRALASDLGY |
| | LEAWCELSTGAPLPWPAPESLLLKFVAHHLWDPVERAEDPSHGMPDDVEMGLRAKGLLRADGPHAPDTVR |
| | RRLTSWSILTRWRGLTGSFTAPSLKSALRLAVRASARPRRRKSKKAVTGQILAKLLATCDGERLVDLRDR |
| | ALLLTAFASGGRRRSEVAGLRVEDLVDEEPVHADPRNAASPLLPCLTINLGRTKTMTAEDRVHVVLIGRP |
| | VEALKQWTEEARIDAGPVFRRIDQWGNIDRRALTPQSVNLILKTRCSQAGLDPELFSAHGLRSGYLTEAA |
| | NRGVPLQEAMQQSLHKSVAQAASYYNNAERKNGRAARLVI |
| 1785 | WP_110880404.1 |
| | MAKTTPSDAIHRRAEDLDALDSILPFDRRDQLAALLTDDDVATLKHLANEGMGDNTLRALTSDLGYLEAW |
| | CQLATGSPLPWPAPESLLLKFVAHHLWDPAKRAEDADHGMPADVEAGLRDSRLLRAKGPHAPDTVRRRLT |
| | SWSILTRWRGLTGTFNGPSLKSALRLAVRASARPRQRKSKKAVTADILAKLLQACAGDRLVDLRDQALLL |
| | TAFASGGRRRSEIAGLRVADLVDEEPVRADPNDANSPALPCLSIRLGRTKTTTSDDDEHVVLIGRPVVAI |
| | KHWLEQANVKDGPVFRRIDQWGNIDRRSLTPQSVNLILKTRCKQAGFDPALFSAHGLRSGYLTEAANRGI |
| | PLPEAMQQSLHKSVTQAARYYNDAERKQGRAARLMI |
| 1786 | WP_120019218.1 |
| | MPKNPARAGGRQSTELVARRAEALDALDSVLPFDRRDFLAGLLTDDDVATLRHLAKEGIGANSLRALASD |
| | LGYLEAWSLAATGFSLPWPAPEALLIKFVAHHLWDLAKRETDPAHGMPADVAATLKSQALLRTDGPHAPA |
| | TVRRRLSSWSTLTKWRGLRGKFNAPGLQSAIKLAVRASARPRGRKSKKAVTADILTALLKACAGDRLVDV |
| | RDRALLITAFASGGRRRSEMASLRFEQIVEEEPVPAEPKAPDSSDKLPCLSIRLGRTKTTQADSDAFVLL |
| | VGRPVLALKGWLERAGITEGAVFRGIDRWGNLEKRALTPQAVNLLLKRRIAEAGLDPQAFSAHGLRSGYL |
| | TETARRGIPLPEAMQQSQHRSVQQASNYYNDAERTLGRAARVI1 |
| 1787 | WP_069694292.1 |
| | MPSSQASPPKIDGMAVARINGEQPDIAEPVIEIGAAEPATLIPARLEALVETATGYAKAASSENTRAAYA |
| | KDWRHFSSWCRREGLEPLPPSSQVIGLYISACAAGEPKRGLPSLSVATIERRLSGLGWNFNQRGQPMDRA |
| | DRHISTVLAGIRRKHAKPPRQKEAVLGDDLLAMIATLGHDLRGLRDRAILLLGFAGGLRRSEIVGLDVVR |
| | DDNSDGAGWIEIYADKGVLVTLRGKTGWREVEVGRGSSDHTCPVVALESWVRFGRIARGPLFRRIFKDNK |
| | TVDVERLSDKHVARLVKQTVLEAGVRSDLPEGERALLFAGHSLRSGLASSAEIEERYVQKHLGHASAEMT |
| | RKYQRRRDRFRTNLTKASGL |
| 1788 | WP_092177345.1 |
| | MTSIALLSTETETRRALQLDALAGILPLERRDKLAHILTDDDVATLRHLAREGMGENSLRALASDLAYLE |
| | AWSLASTGSALPWPAPEALVLKFVAHHLWDPAQRESDPAHGMPAEVDEVLRAGDHLRSAGPHASSTVKRR |
| | LAHWATLHRWKGLESPLGTPAIRTSVRLAVRASAKPRRRKSKRAVTRDILDRLIATCQSDRLADTRDLAI |
| | LLVAFASGGRRRSEVARLRLEQLTLEADVPLDPDDPNSARLPCMAIALGRTKNSQADDDARVLLIGPPVE |
| | ALREWLERAAISKGAVFRAIDRWEAIDDRALTPQAINLILKRRCALAGLDPVAFSAHGLRSGYLTEAARN |
| | GVALPAAMRQSQHRSVQQAARYYNDADQALGKAARLAI |
| 1789 | WP_057193706.1 |
| | MTSTSLLSAETETRRALQLDALAGILPLERRDKLATILTDDDVATLRHLAKEGMGENSLRALASDLAYLE |
| | AWSFASTGSALPWPAPEALVLKFVAHHLWDPTQRESDPAHGMPAEVDAALRAGDHLRSEGPHAPSTVKRR |
| | LAHWATLHRWKGLESPLGTPAIRTSMRLAVRASAKPRRRKSKRAVTRDILDRLIATCQTDRLADTRDLAI |
| | LLVAFASGGRRRSEVARLRLEQLTLEADVPLDPDDPNSPRLPCMAIALGRTKTAQADDDARVLLIGPPVA |
| | ALREWIERAAIKTGAVFRAIDRWEAIDDRALTPQAINLILKRRCAMAGLEPIEFSAHGLRSGYLTEAART |
| | GVTLPAAMRQSQHRSVQQAARYYNDADQALGKAARLAI |
| 1790 | WP_133565315.1 |
| | MTTTALLSADSETRRALQLDALAAILPLERRDQLAKILTDDDVATLRHLAQEGLGENSLRALASDLAYLE |
| | AWSLASTGSALPWPAPEALVLKFVAHHLWDPAQRETDPAHGMPAEVDAVLRSGDHLRSDGPHAPSTVKRR |
| | LAHWATLHRWKGLMGPFAAPSLRTAMRLAVRASARPRRRKSQRAVTREILDRLLATCRSDRLSDTRDLAL |
| | LLTAFGSGGRRRSEIARLRVEQLSEEAPVPLDPEDLNSPRLPCLAITLGRTKTAMANDDARVLIVGPPVE |
| | ALREWLERANISKGAVFRAIDRWEGLSDRALTPQAVNLILKRRCAQAGLNPWEFSAHGLRSGYLTEAARN |
| | GVSLPAAMQQSQHRSVQQAASYYNEADRQLSKAARLAL |
| 1791 | KSV89580.1 |
| | MVSAVESPSPLPAHLEDLADRARGYVEAASSANTRKAYASDWKHFSAWCRRQNLAPLPPDPHVVGLYITA |
| | CASGTTERSVKANSVSTIERRLSAIAWNCTQRGQPLDRKDRAIATVMAGIRNRHAAPPRQKEAILPEDLI |
| | AMLETLERGTLRGLRDRAILLIGFAGGLRRSEITGLDLGRDQTEDGRGWIEILDKGLLLTLRGKTGWREV |
| | EIGRGSADTTCPLVAVETWIRFAKLAKGPLFRRVTGRGKDVGPDRLNDKAVARLVKSAALAAGLHGDLGE |
| | DERAARFSGHSLRAGLASSAEVDERHVQKQLGHASAEMTRKYQRRRDRFRVNLTKASGL |
| 1792 | WP_058323347.1 |
| | MAQIVAQNRKNHAKETSAPSDSTAHSGDDPALVSAVESPSPLPAHLEDLADRARGYVEAASSANTRKAYA |
| | SDWKHFSAWCRRQNLAPLPPDPHVVGLYITACASGTTERSVKANSVSTIERRLSAIAWNCTQRGQPLDRK |
| | DRAIATVMAGIRNRHAAPPRQKEAILPEDLIAMLETLERGTLRGLRDRAILLIGFAGGLRRSEITGLDLG |
| | RDQTEDGRGWIEILDKGLLLTLRGKTGWREVEIGRGSADTTCPLVAVETWIRFAKLAKGPLFRRVTGRGK |
| | DVGPDRLNDKAVARLVKSAALAAGLHGDLGEDERAARFSGHSLRAGLASSAEVDERHVQKQLGHASAEMT |
| | RKYQRRRDRFRVNLTKASGL |
| 1793 | WP_132665865.1 |
| | MMADNTNLNADMPRPAPSPSLPGHLQDLTDRARGYVEAASSANTRKAYASDWKHFAAWCRRSSLPLLPPH |
| | PQTIGLYITACSSGTAERGGKPNSVSTIGRRLSSLSWNYTQRGQQLDRKDRHIATVMAGIRNSHARPPVQ |
| | KEAVMAADIIAMIETLDRSTLRGMRDRAMLLVGYAGGLRRSEIVGLDVKADQTEDGRGWIEIFDKGMLVT |
| | LRGKTGWRQVEVGRGSSDATCPVVAVETWIRFAKLGHGPLFRRVTGQGKSIGAERLNDKEIARLVKRAVV |
| | AAGVRGDLSELERALKFSGHSLRAGLASSADVDERYVQKQLGHASAEMTRRYQRRRDRFRINLTKAAGL |
| 1794 | WP_069694293.1 |
| | MTSIALLSTESDTRRALQLDALAGILPLERRDQLAKILTDEDVATLRHLAREGMGENSLRALASDLAYLE |
| | AWSLASTGSALPWPAPEALALKFIAHHLWDPARRAEDFSHGMPADVEASLRAGDHLRSDGPHASSTVKRR |
| | LAHWATLHRWKGLESPLGTPAIRTGLRLAVRASAKPRRRKSKRAVTRDILDRLIATCQSDRLADSRDLAI |
| | LLVAFGSGGRRRSEVARLRLEQLTIEADVPLDPDDQDSARLPCMAIALGRTKNSQADDDARVLLIGPPVE |
| | ALREWLERAAISKGAVFRAIDRWEAIDDRALTPQAINLILKRRCAQAGLDPIAFSAHGLRSGYLTEAARN |
| | GVALPAAMRQSQHRSVQQAARYYNDADQALGKAARLAI |
| 1795 | RWE07715.1 |
| | MENPPSKPAKKDLPAADRPDGDLPDIVDLVMEMGRTAPRVPAHVEDLVETAKGYANAASSENTRDAYAKD |
| | WRHFTSSCRRTGFDPLPPDSKTIGLYISACARGEPKHGSPPLSVATIERRLSGLAWNFIQRGFVMDRADR |
| | HIATVLAGIRRKHAKPPRQKEAVLGDDLLAMIATLGHDLRSLRDRAILLLGFAGGLRRSEIVGLDVTREE |
| | TSDGAGWIEIFPDKGVLVTLRGKTGWREVEVGRGSSDLSCPVAALESWIRFGRIARGPLFRRIFKDNKTV |
| | DVGRLSDKHVARLVKKTALAAGVRSDLPEGERGLLFAGHSLRSGLASSAEIEERYVQKQLGHASAEMTRK |
| | YQRRRDRFRTNLTKASGL |
| 1796 | WP_011578806.1 |
| | MASHIDQNSENRTRHRSAQPQETPPGVDETAPAGSAEHDASIADDMPDIIDVVLEMGRAPEEPPDGAPSP |
| | ALPVVSTPRLPAHLDALADRARDYVEAASSSNTRRAYASDWKQFASWCRRQGVEMFPPDPQVVGLYIAAC |
| | ASGKATGDRKPNSVSTIERRLSALTWNYAQRGQPLDRKDRHIATVMAGIRNKHAAPPRQKEAVLPEDLIA |
| | MLETLDRGTLRGLRDRAMLLLGFAGGLRRSEVVGLDCGRDQTEDSSGWIEILDKGMLLRLRGKTGWREVE |
| | VGRGSSDTTCPVVALETWLKLARIAHGPLFRRVTGQGKKVGADRLNDQEVARLVKRTALAAGVRGDLPEG |
| | ERGMKFAGHSLRAGLASSAEVDERYVQKQLGHSSAEMTRKYQRRRDRFRVNLTKASGL |
| 1797 | RWD51833.1 |
| | MPSVDEARATASLVDQNPENRARRSSAQPQETATPVDQDAVDQTAAAPSAEPNGSSTDDLPDIIDVVMEM |
| | GRAPEQPSADAPSALPVVANARLPAHLDALADRARGYVEAASSANTRRAYASDWKQFASWCRRQGVEMFP |
| | PDPQVVGLYVTACASGKATGDKKPNSVSTIERRLSSLTWNYAQRGQPLDRKDRHIATVMAGIRNKHAAPP |
| | RQKEAVLPEDLIAMLETLDRGTLRGLRDRAMLLLGFGGGLRRSEVVGLDVGRDQTEDSSGWIEILDKGML |
| | LRLRGKTGWREVEVGRGSSDTTCPVVALETWLKLARIAHGPLFRRVTGQGKSVGADRLNDQEVARLVKRT |
| | ALAAGVRGDLPEGERGMMFAGHSLRAGLASSAEVDERYVQKQLGHTSAEMTRKYQRRRDRFRVNLTKASG |
| | L |
| 1798 | WP_096459680.1 |
| | MASLVDQNPEKHTQHGSAQPQETAPGVDQIAQAGSAGHDTPIADDLPDIIDVVLEMGRAPEEAPADTPSP |
| | LPVVANPRLPAHLDALAGRARDYVEAASSANTRRAYASDWKQFASWCRRQGVEMFPPDPQVVGLYITACA |
| | SGKAPGEKKPNSVSTIERRLSSLTWNYAQRGQPLDRKDRHIATVMAGIRNKHAAPPRQKEAVLPEDLIAM |
| | LETLDRGTLRGLRDRAMLLLGFAGGLRRSEVVGLDCGREQTEDSSGWIEILDKGMLLRLRGKTGWREVEV |
| | GRGSSDTTCPVVALETWLRLARIAHGPLFRRVTGQGKAVGADRLNDQEVARLVKRTALAAGVRGDLPEGE |
| | REKLFAGHSLRAGLASSAEVDERYVQKQLGHTSAEMTRRYQRRRDRFRVNLTKASGL |
| 1799 | RWD87033.1 |
| | MNQPTADDLPDIVDLVMEMGQPVRPPAHVEALVETAKGYAKAASSENTRNAYAKDWRHFTSWCRRQGFEP |
| | LPPDPKIIGLYISACAAGEPKHGAPALSVSTIERRLSGLAWNFTQRGFAIDRADRHISSVLAGIRRKHAK |
| | PPRQKEAVLSDDIKAMVNTLGHDLRSLRDRAILLLGFAGGLRRSEIVGLDVVRDDHSDGNGWIEFFPGQG |
| | VLVTLRGKTGWREVEVGRGASDQTCPVAALESWIRFGRIARGPLFRRIFKDNKTVDVERLSDKHVARLVK |
| | RTALAAGVRSDLPEGERAGLFSGHSLRAGLASSADIEERYVQKQLGHASAEMTRKYQRRRDRFRTNLTKA |
| | SGL |
| 1800 | WP_016210837.1 |
| | MSSKQIKKIMTAESRTEISTTLSSSSRQFLENTLAQATKRGYAADLKIFFAWAEAHQTAAIPATAETIAN |
| | FLADQASGVLSVWLRQESQLINGRPVSVATLRRRLAAIKYAHKLNKIEPSPTDTAEVRETLKGIRRTLGA |
| | KPNAKSALMSQDIQLLMRYIPETITGQRDRAILLLGFAGALRRSELTSLELSDIEVQENGMLVYIRSSKT |
| | DQEQQGQVIGIARSENKANCPVGAIEQWLQSSMILSGPIFRRIFANGKIAITTLSDRTIYNIVKNYCQLA |
| | GLDASRFGAHSLRRGFVTSAAKAKVDPFRIMAVTRHKRLETVKRYVDEANLINDYPGADLLK |
| 1801 | WP_073288106.1 |
| | MSEDLSLLPASDASHSLSHHLGRASAKVAGFLEAGLQGAANTERAYTSDLKSYVTFCEQHGFVAVPAEVE |
| | TITEYVAYLASEKVEPAPGGSRGKKKGQQPLTGPHALATIKRHLAAIRKAHQLAGHRLPATLDALNIVME |
| | GIARTLGKRQEQAQAFTVEELKQAIRRIDLETSAGLRDRALLLLGFAGAFRRSELVDLNIEQLEFTERAL |
| | LVHLAKSKTNQYRAVEDKAIFYAPNADYCPVRCLRAWLGLLGRTTGPLFVKIPRASPGQMAAPSDKRLSD |
| | ISINKLVQKRLGPDYSAHSLRVSFVTVAVLNGQSHKAIKNQTKQKTDAMIERYTQLNNVVSYNAAQALGL |
| 1802 | WP_092743158.1 |
| | MREDLTIVPASTVPPTVSTQLARASAKVASFLEVGLQGAANTERAYTSDLKSYVGFCERHGLRALPADVE |
| | TLTEYVAYLATEKPTPEPSDGGRGEKKKRKGQQPLTRPHSLATIKRHLAAIRKAHQLAGHRLPVTLDALN |
| | VVMEGIARTLGKRQDQAQAFTAEELKQAIRRIDLETSAGLRDRALLLLGFAGAFRRSELVELNIEQLEFT |
| | ERALLVHLAKSKTNQYGAVEDKAIFYAPTMDFCPVRCLRAWLNLLGRNTGPLFVKIPRATPGQMAAPSDK |
| | RLSDISINKLVQKRLGPAYSAHSLRVSFVTVAVLNGQSHKAIKNQTKQKTDAMIERYTQLNNVVSYNAAQ |
| | SLGL |
| 1803 | WP_026351576.1 |
| | MREDLSIVPASTVPPTVSTQLARASAKVAGFLEVGLQGAANTERAYTSDLKSYVGFCERHGLRALPADVE |
| | TLTEYVAYLATEKPIPEPGTGGRGEKKKRKGQQPLTRPHSLATIKRHLAAIRKAHQLAGHRLPATLDALN |
| | VVMEGIARTLGKRQDQAQAFTVEELKQAIRRIDLETSAGLRDRALLLLGFAGAFRRSELVELNIEQLEFT |
| | ERALLVHLTKSKTNQYGAVEDKAIFYAPTMDFCPVRCLRAWLNLLGRTTGPLFVKIPRAAAGQMAAASEK |
| | RLSDISINKLVQKRLGLGYSAHSLRVSFVTVAVLNGQSHKAIKNQTKQKTDAMIERYTQLNNVVSYNAAQ |
| | ALGL |
| 1804 | WP_089334212.1 |
| | MSEDLSLVASSPAGQSVGAQLARASAKVAGFLEVGLQGAANTERAYTSDLKSYVTFCEQHGFVAVPADVD |
| | TLTEYVAYLASEKPVSDTMGGGGKKKRKGQQPLTRPHSLATIKRHLAAIRKAHQLAGHRLPATLDALNIV |
| | MEGIARTLGKRQDQAPAFTVEELKQAIRRMDLETSAGLRDRALLLLGFAGAFRRSELVDLNIEQLDFTER |
| | ALLVHLAKSKTNQYGAVEDKAIFYAPNADYCPVRCLRAWLHLLGRTTGALFVKIPRAAPGQMAVPSDKRL |
| | SDISINKLVQKRLGPDYSAHSLRVSFVTVAVLNGQSHKAIKNQTKQKTDAMIERYTQLNNVVSYNAAQAL |
| | GL |
| 1805 | WP_086597010.1 |
| | MNEDLSLIPAANANQSISAQLARASAKVAGFLEAGLQGAANTERAYTADLKSYVAFCEQHGLQAVPADVD |
| | TLTEYVAYLASEKPEPAPGEGTRKKGQQPLTGPHALATIKRHLAAIRKAHQLAGYRLPATLDALNLVMEG |
| | ITRTLGKRQEQAQAFTVEELKQAIRRIDLDTSAGIRDRALLLLGFAGAFRRSELVELNIEQLEFTERALL |
| | VHLAKSKTNQYGAIEDKAIFYAPTMDYCPVRCLRAWLYLLGRTTGPLFVKIPRTIPGQLAVPSTKRLSDI |
| | SINKLVQKRLGPAYSAHSLRVSFVTTAVLNGQSHKAIKNQTKQKTDAMIEHYTQLHNVVSYNAAQALGL |
| 1806 | WP_092511277.1 |
| | MAGGLSLIDQEVVFIPDNPELNEDVLRNLHAFMKDKEAFADNTWQQLMKASRLWCQWCIGKGRPYLPVDA |
| | DYLRDYLWELHENGLAPATISNYAAMLNLLHRQAGLIPAGDSQKVKRILKKIHRVAIVHGEKAGQAIPFR |
| | IADLNQVDTAWQDSASLKERRNLAFLFVAYNTLLRISNLARLKVGDVTFNPDGSVMLHIGYTKTQVDGQG |
| | SIKALSPRASASLRHWLQVSGLIEHPDAYIFCRVHRSNQAIVATEKPMDEFNLSQVFSAAWSVVHGDKKA |
| | ARNKGRYATWTGHSARVGAAQDMTESGYSLAQIMHEGAWKKPETVLGYIRNIEAKKSVMIELVEGKS |
| 1807 | WP_055739375.1 |
| | MEDRLQDFIHFMVVEKGLSKNTILSYERDLKNYLLYIQKVEQITSLNDITRVHIVHFLHHLKKQGKSAKT |
| | LARHVASVRSFHQFLLREKATEHDPSVHIESPQIEKTLPKVLNLSEVEALLESPDEDSPLGIRDRAMLEL |
| | LYATGIRVSELIQLNLDDLHLTMGFIRCIGKGNKERIIPIGKTASNVIEKYISIGRPKLKSKQNSTEALF |
| | LNHHGNRLTRQGFWKILKGLAKKANIEKDLTPHTLRHSFATHLLENGADLRAVQEMLGHADISTTQIYTH |
| | VTKIRLKDVYSKHHPRA |
| 1808 | WP_058066517.1 |
| | MSSTTQAKASLEAELAKHPGIEIHGNSIRVVFMWRRRRYRETLGLPLTKANIKHAALLRAAVLHDIKIGT |
| | FDYGRHFPNSRNATNFSNTKDERLHALLERYKPLKAVDITTETQSRYFAALDICVDLLGGNRLGSILLPE |
| | DIQKLRVELIAGRATSTTNHYLATLAGFLNWCESNGYCRKGLAEACTRFTMTDRDPDPLTKSEFEALLDK |
| | GCLHPMDHAAITLAVYTGLRPGELCALAREDVDMANGLIHVNRSITSSGTFKLPKTGKKRTVMLFPPALE |
| | ACRVLLGIKHGIAPQKLAIELNRHESVQETVTPLLTPLVQARRKQINTWFVPTAWNTKWHNIQRRAKIRP |
| | RRPYQTRHTYACWCLVARGNLAFIAKQMGHKDFTMLVQVYAKWMDDESPNELSSIWAGMSR |
| 1809 | WP_002187515.1 |
| | MSISSNVILISDHRKKKYKKSLNNDSGSMFGKGLTDEMMSYLTKEFANPVSERAYRNRAIFLILSQTALR |
| | AKETVNLRFSDLLKAPTNETLARYVKKGGRIAYSVISESCLKSVQEYHSKFNLKSDYFFLSLPRRNQNWR |
| | SNLSTRGLQLIVNSWNVRTCSGRISRPHCFRHTAGTKLLETSGSIAAQLTLGHSSPIITSKYYTKRYYNA |
| | SMFLTWE |
| 1810 | WP_127622166.1 |
| | MIDNQRAARSDSQAVHRRAEELDALDAILPFDRRDQLSALLTDDDVATLKHLAQEGMGENTLRALSSDLG |
| | YLEAWCRLATGDPLPWPAPEALLLKFVAHHLWDPVKRAEDPAHGMPADVEAGLRAERLLRSPGPHAPGTV |
| | RRRLTSWSILTRWRGLAGAFGAPSLKSALRLAVRASARPRQRKSKKAVTVDILVQLLQACAGDRLVDVRD |
| | RALLLAAFASGGRRRSEVAALRVEDLADEELVRADPSDKTSPPLPCLSIRLGRTKTTTADENEHVLLIGR |
| | PVAALKTWLAEAQIKDGPVFRCIDRWGNIDRRALTPQSVNLILKARCEQAGLDPALFSAHGLRSGYLTEA |
| | ANRGIPLPEAMQQSLHKSVTQAASYYNNAERKNGRAARLIV |
| 1811 | WP_101200924.1 |
| | MTDLMSVSDISDETVRSQVLANLEEFKHDLLDDMASNTKRAYLSDFEHYLSFCLKHGLVSMSDDWRVTKD |
| | TIKTYFVSLMASDLKNASIKRKLSSIKFFIGIAELPDPFKHSKLLRDFITNKLKKKPAAQTQANPVTAEV |
| | LVALNETFNPLSLLDIRNKLLVNLAFDSLFRASNLAEIEVAHIDREHGSVFASYSKTDQEGQGSYGYISP |
| | KTIILLDEWLNASGITERFIFRTLSPKQTVQQKTMGYQAIYKTFKNFGGSRYLDNKISYSCHSTRVGATV |
| | SMTEQNRPLIKIIQAGNWKSERMAIRYGQRTNVAKGGMVDI1 |
| 1812 | WP_068331637.1 |
| | METDTALLANPVGHGLAHHTGAAARYVEAGLNGAPNTTRAYTAHLKRFGGWCAAHGHQPLPASVDALVGF |
| | CTHLAEAGKKVGTLQQHCAAISKAHAVRGVDSPTDDKQFKIFMDGVRRVHGVRQKQAPAFSLAQFKQLVR |
| | GLDTTTVAGLRDRAILLLGFTGAFRRSELTALNVQDLRFTEDCLVVSLGRSKTNQLGDYEEKAIFYSPES |
| | AVCPIRSLKAWLAQLERSEGPVFVMLRKGNRLTTNRLSDQTINTLVQRYLGAGYTAHSLRASFVTVAKLN |
| | GADDSKIMNQTKHKTSAMIRRYTRLDNVQQHNAAKELGL |
| 1813 | WP_023274785.1 |
| | MKIPKPRKRGDSFRIELMYEGRRISATRDTEKECEQWAALKLLEFKTGKAQEEKGIKPSFPFKKLCEKYF |
| | LEKGSKLKSSHVIRNKLDNLERITGELANKSIYDFKPNDIVRWRNRRVLEVKSSTALREFAMFSAIFTYA |
| | QKELFLIENNVWNTVVKPDKGKGRSQRISPEDQEKIFKRSKWDNETAPFYSQHYVGWSLLFALETAMRQG |
| | EILAMKRKDVRDGFIHLPITKNGESRDVPLSKEAKRLLSLLPVENDILVPVKVKTFKRTWIRMRDEAGLS |
| | HINFHDTRHEAITRMVRNRKLPVEVLAKITGHKTINILINTYYNPNYECKFFPRVSHDIHQ |
| 1814 | WP_018409463.1 |
| | MTKIDDDLESGGAPLAERPSAPHLAALSEKARDYARNARSDNTRRAYDADWRQFAAWLRRQGLDPLPPEP |
| | QTVGLYLTACMEGVLGREPVSVATLERRLAGICWHYRQCGAPLDTSDRHIATVLAGIRRAHSRPPLQKEA |
| | IFADELLAMLSVLEMDLRGIRDRAILAIGFSGGLRRSEIVGLDCGPDQTEDGAGWVEIFPPAGPGNEGGA |
| | VLQISGKTGWREVEIGRGSRPETCPVALLETWMRLGRISHGPLFRPIARKNGGVSSERLTDKHVARLVQK |
| | TALAAGIRGDLTEGERRLAFGGHSLRAGLASSAQIEEAHVQKHLGHASAEMTRRYQRKRDRFRVNLTKAA |
| | GL |
| 1815 | WP_010305236.1 |
| | MGYKIKKFIMSSGERGHLILDKETELPVYYQNLFLTENVRNRNATASTVEVVATNLLIFSNFLDSRKINI |
| | VERIEAKKYLSIAEINDLIRYAKQRFDKQKITNIRQMNKMFIAKRTFSYRIHVFSSYLKWLCILVHSTKG |
| | IHDRYEVDNFIESIKAYIPRKSSLNMNDRSDKSLDEGEIRILFNLLKVDGNNNPFQKDVQIRNRLIFSLL |
| | FNLGLRAGELLNLKIDDFDLRDNTLSIIRRHDSKEDRRSYQPLVKTGERVIPLSDELASDIFRYISDSRE |
| | KMTKRKKHNFLLVAHYTGKTAGEPLSISAYEKIISTLKRASPELSKLSGHRLRHSWNYIYSKEMDVSNLE |
| | FGRKKELRNYCQGWSKGSKMSENYNFKYISQQEKEVILRIYGSINKIISGA |
| 1816 | WP_008737017.1 |
| | MTTPLSVRAIESMRPGDSPRTDVGETQGLRVTCAKSGVRTFIYRYRSPETGKLVQLKLGHYPGLKLAEAR |
| | MQVVRMKELQRAGVCPKAQQERELAAQREEEEKARREQEAAAFLVADLIELYLTEVIEDRMIKDARTGKP |
| | KRVAGSRKPKGQAEVRRTLYNDPVRVLGDMPAGEVTRKHVVDLVRKILARGANVQAGNVLRELTAAYEYA |
| | IAMEKLPEDFANPAMLAKGSLRTARVKLSSEKGRRALSDEDLRALLAWLPGSGFSVTQKNVIRLTLWTGC |
| | RTGEVCEAEWRDVDLEKGVWHMRDSKNGAERYVQLSRQAVEFLRQLKLNGTTYVFPSSRSGRPIQQKSLS |
| | EAKWQLKHPEQVQNRRVYRPEQRWLTTIEDWSPHDLRRTVRTGLSRLGCPSEVAEAVLGHSRKGIEGTYD |
| | LHRYEDQCKVWLQKWADHLDTLLRQKG |
| 1817 | WP_006526094.1 |
| | MRQLRRLQRTKGYLRKTDDKHGREIVKPFIKSDFDEMVRCCLNHRDKHNPSSWKYRVWYRNYILLILGVN |
| | TGNRIETLIELTPRDIAGGQYTCKEMKTGKVQQFNMNADVYATVREYIERYNIQMNEYIFESRQGFKGYP |
| | ITRQQAWRIIKQLADEAGIKYPVACHSLRKSYGRWYWDSTHDLLTTQKLLMHESAAETMLYIMLEPSDIQ |
| | EVRESINHTEKWG |
| 1818 | WP_127657123.1 |
| | MPNLVTPRETNLDDEALEALSDLFVRGTPANTIRAYERDLAYITAWKMAAFGTDLAWPEEEAVAMRFVLD |
| | HSRDLQDISGDAARVAQSLISQGLRRSLECPAPSTLDRRIASWRSFHRMRNLPSPFDAPLIRQARSKARR |
| | AAGRPAAPKSANPITREIVDEMCAAAGPGLRGIRDRAILLLGWASGGRRRSEIATLRREDVDLGDFDSDG |
| | IVWLRLRDTKTTRQEQTPKLVLKGRAARAVTAWIDAAEIRDGALFRKIGTTGRPGTRALSPAGIGQIVKR |
| | CLEQSGRGADFASAHGLRSGFLTQAALDGAPLQAAMRLSLHKSAAQAQAYYGDVEITDNPATDLLDKS |
| 1819 | WP_071857225.1 |
| | MNQQEANRRMEEEIQFFPWFIQNYFRKKSGDQYSSITLYEYAKEYRRFLNWLIQESFSSADKISEVTLTE |
| | FANLWPEDLEFYKAHLVKAPKILKETTQKRLEENDQSLPLRQNATVQRGITALRSLFNYLNDAVDRNSGK |
| | PYLEHNMMAKVANVKDNKTMAERGAAIEKKLFLDEEAIDFLDYIEHRYIDTLETRQAITAFKKNQVRDLA |
| | IIALFLGTGMRLSELVNMNVQDLDLTSGEARVYRKGGKWDMVVISSIAMEFLTNYLAQRENLYQPAETET |
| | ALFLTRYRGKAKRIASGAVEAMVGKYSESFKIKISPHKLRHSVATQLYSKTNSLIQVAEQLGQSGTSATT |
| | VYTHIAGKQKRDAMNDLWT |
| 1820 | WP_107676128.1 |
| | MQNPPANTPKIDDSADSALPAGVELVVEMDAASRPARLEALVETATAYANAASSENTRDAYAKDWRHFTT |
| | WCRREGFEPMPPSSQVIGLYIGACASGDPKRNTPALSVATIERRLSGLAWNFTQRGIPMDRSNRHIATVL |
| | AGIRRKHAKPPRQKEAVLGEDIKAMVDTLGHHLRGLRDRAILLLGFAGGLRRSEIVGLDIVRDDHSDGHG |
| | WIEIFPSQGVLVTLRGKTGWRQVEVGRGASEQTCPVVALESWIRFGRIVRGPLFRRIFKDNKTVDVERLS |
| | DKHVARLVKQTALAAGVRSDLPEGERALLFAGHSLRAGLASSAEIEERYVQKQLGHASAEMTRKYQRRRD |
| | RFRTNLTKASGL |
| 1821 | WP_003132298.1 |
| | MTITKNKNGTWRVDISDGINPLTGIQGRHRKYDCKTKKEAIEYEAKYRLEELGEFKRKDKLSIDSLYALL |
| | KKEDVLRGNRQSTKDTQDSYYRIYVSKFFQNADMRLVKTSDIKAFRDWLIKTPSVKGGNLSASNINTIMI |
| | FVGKLFDISMMNDLRKDNPCKALKRLPQQHKEMFYYTPEQFKQFISLFDESEYHFQLLYKILMFTGARIG |
| | EALALTWEQINLEIGYIDIKSSAHYRKSKVTIAETKTTQSIRRIYIHKALIDELSKWKQRQFQLLIKYIS |
| | TPEQLQIYQNTPKVLTAPDVSNFKKEKLKKRAELINLKLIRNHDFRHSHAAFLISQGLRKGEGKDYLFFT |
| | LMKRLGHSSITTTINTYSHLFPTQQKEIANAFDDF |

[0098] In some embodiments, a recombinase polypeptide (e.g., comprised in a system or cell as described herein) comprises an amino acid sequence as listed in Table 2, or an amino acid sequence having at least 70%, 75%, 80%, 85%, 90%, 95%, 96%, 97%, 98%, 99%, or 100% sequence identity thereto, or having no more than 1, 2, 3, 4, 5, 6, 7, 8, 9, 10, 15, 20, 25, 30, 35, 40, 45, or 50 sequence alterations (e.g., substitutions, insertions, or deletions) relative thereto. In some embodiments, a recombinase polypeptide (e.g., comprised in a system or cell as described herein), or a portion thereof, has at least 70%, 75%, 80%, 85%, 90%, 95%, 96%, 97%, 98%, 99%, or 100% sequence identity to the amino acid sequence of a DNA binding domain, recombinase normal, N-terminal domain, and/or C-terminal domain of a recombinase polypeptide as listed in Table 2, or having no more than 1, 2, 3, 4, 5, 6, 7, 8, 9, or 10 sequence alterations (e.g., substitutions, insertions, or deletions) relative thereto. In some embodiments, a recombinase polypeptide (e.g., comprised in a system or cell as described herein) has one or more of the DNA binding activity and/or the recombinase activity of a recombinase polypeptide comprising an amino acid sequence as listed in Table 2, or an amino acid sequence having at least 70%, 75%, 80%, 85%, 90%, 95%, 96%, 97%, 98%, 99%, or 100% sequence identity thereto, or an amino acid sequence having no more than 1, 2, 3, 4, 5, 6, 7, 8, 9, 10, 15, 20, 25, 30, 35, 40, 45, or 50 sequence alterations (e.g., substitutions, insertions, or deletions) relative thereto.

[0099] In some embodiments, an insert DNA (e.g., comprised in a system or cell as described herein) comprises a nucleic acid recognition sequence as listed in column 2 or 3 of Table 1, or a nucleic acid sequence having at least 70%, 75%, 80%, 85%, 90%, 95%, 96%, 97%, 98%, or 99% identity thereto, or having no more than 1, 2, 3, 4, 5, 6, 7, or 8 sequence alterations (e.g., substitutions, insertions, or deletions) relative thereto. In some embodiments, an insert DNA (e.g., comprised in a system or cell as described herein) comprises one or more (e.g., both) parapalindromic sequences of a nucleic acid recognition sequence as listed in column 2 or 3 of Table 1, or a nucleic acid sequence having at least 70%, 75%, 80%, 85%, 90%, 95%, 96%, 97%, 98%, or 99% identity thereto, or having no more than 1, 2, 3, 4, 5, 6, 7, or 8 sequence alterations (e.g., substitutions, insertions, or deletions) relative thereto. In some embodiments, an insert DNA (e.g., comprised in a system or cell as described herein) comprises a spacer (e.g., a core sequence) of a nucleic acid recognition sequence as listed in column 3 of Table 1, or a nucleic acid sequence having at least 70%, 75%, 80%, 85%, 90%, 95%, 96%, 97%, 98%, or 99% identity thereto, or having no more than 1, 2, 3, 4, 5, 6, 7, or 8 sequence alterations (e.g., substitutions, insertions, or deletions) relative thereto. In certain embodiments, the insert DNA further comprises a heterologous object sequence.

[0100] In some embodiments, an insert DNA (e.g., comprised in a system or cell as described herein) comprises a nucleic acid recognition sequence as listed in column 2 or 3 of Table 1, or a nucleic acid sequence having at least 70%, 75%, 80%, 85%, 90%, 95%, 96%, 97%, 98%, or 99% identity thereto, or having no more than 1, 2, 3, 4, 5, 6, 7, or 8 sequence alterations (e.g., substitutions, insertions, or deletions) relative thereto, that is the cognate to a human recognition sequence (e.g., as listed in column 3 of Table 1, e.g., in the same row as that listing the nucleic acid recognition sequence in column 2), or a nucleic acid sequence having at least 70%, 75%, 80%, 85%, 90%, 95%, 96%, 97%, 98%, or 99% identity thereto, or having no more than 1, 2, 3, 4, 5, 6, 7, or 8 sequence alterations (e.g., substitutions, insertions, or deletions) relative thereto. In certain embodiments, the cognate human recognition sequence is located in the human genome at a position listed in column 4 of Table 1 (e.g., corresponding to the cognate human recognition sequence listed in the same row in column 3).

[0101] In some embodiments, an insert DNA or recombinase polypeptide used in a composition or method described herein directs insertion of a heterologous object sequence into a position having a safe harbor score of at least 3, 4, 5, 6, 7, or 8. In some embodiments, an insert DNA or recombinase polypeptide used in a composition or method described herein directs insertion of a heterologous object sequence into a genomic safe harbor site that is unique, with 1 copy in the human genome. By way of example, a unique site may be present at 1 copy in the haploid human genome, such that a diploid cell may comprise 2 copies of the site, situated on a homologous chromosome pair. As a further example, a unique site may be present at 1 copy in the diploid human genome, such that a diploid cell comprises 1 copy of the site, situated on only one chromosome of a homologous chromosome pair.

[0102] In some embodiments the three base pairs in the parapalindromic sequence directly adjacent to the core sequence (a “core adjacent motif”) comprise AAA, AGA, ATA, or TAA. In some embodiments, the core adjacent motif comprises at least one A (e.g., comprises 2 or 3 As). In some embodiments, the core adjacent motif is ANA or NAA (where N is any nucleotide). In some embodiments, a DNA recognition site described herein comprises a first core adjacent motif in the first parapalindromic sequence and a second core adjacent motif in the second parapalindromic sequence. In some embodiments, the first core adjacent motif and the second core adjacent motif have the same nucleotide sequence, and in other embodiments, the first core adjacent motif and the second core adjacent motif have different sequences.

[0103] In some embodiments, the DNA recognition sequence on the insert DNA has 0, 1, 2, 3, 4, 5, 6, 7, 8, 9, 10, 11, 12, 13, 14, 15 or more mismatches as compared to the human DNA recognition sequence. Without wishing to be bound by theory, it is contemplated that the mismatches between the DNA recognition sequences may, in some embodiments, bias recombinase activity towards integration over excision, for example, as described in Araki et al., Nucleic Acids Research, 1997, Vol. 25, No. 4, 868-872, incorporated herein by reference in its entirety. In some embodiments, the DNA recognition sequences on the insert DNA and/or the human DNA recognition sequences each comprise 1, 2, 3, 4, 5, 6, 7, 8, 9, 10, 11, 12, 13, 14, 15 or more mismatches as compared to the native recognition sequence recognized by the recombinase polypeptide. In certain embodiments, recombination between the insert DNA and the human DNA recognition sequence results in the formation of an integrated nucleic acid molecule comprising two recognition sequences flanking the integrated sequence (e.g., the heterologous object sequence). In certain embodiments, one or both of the two recognition sequences of the integrated nucleic acid molecule comprises 1, 2, 3, 4, 5, 6, 7, 8, 9, 10, 11, 12, 13, 14, 15 or more mismatches as compared to one or more of (e.g., one, two, or all three of): (i) the native recognition sequence, (ii) the recognition sequence on the insert DNA, and/or (iii) the human DNA recognition sequence. In some embodiments the mismatches are all present on the same parapalindromic sequence. In some embodiments the mismatches are present on different parapalindromic sequences. In embodiments, one or both of the two recognition sequences of the integrated nucleic acid molecule comprises 1, 2, 3, 4, 5, 6, 7, 8, 9, 10, 11, 12, 13, 14, 15 or more mismatches as compared to the native recognition sequence. In some embodiments the mismatches are present in the core sequence. It is contemplated that, in some embodiments, these differences between the recognition sequence(s) of the integrated nucleic acid molecule and the native recognition sequence, the insert DNA recognition sequence, and/or the human DNA recognition sequence result in reduced binding affinity between the recombinase polypeptide and the recognition sequences of the integrated nucleic acid molecule, compared to the recognition sequence(s) of the integrated nucleic acid molecule and the native recognition sequence.

[0104] In some embodiments, a human recognition sequence (e.g., a human DNA recognition sequence, e.g., as listed in column 3 of Table 1) is located in or near (e.g., within 1, 2, 3, 4, 5, 10, 15, 20, 30, 40, 50, 75, 100, 150, 200, 300, 400, 500, 600, 700, 800, 900, 1000, 2000, 3000, 4000, 5000, or 10,000 nucleotides of) a genomic safe harbor site. In some embodiments, the human recognition sequence is located at a position in the genome that meets 1, 2, 3, 4, 5, 6, 7, 8 or 9 of the following criteria: (i) is located >300 kb from a cancer-related gene; (ii) is >300 kb from a miRNA/other functional small RNA; (iii) is >50 kb from a 5′ gene end; (iv) is >50 kb from a replication origin; (v) is >50 kb away from any ultraconserved element; (vi) has low transcriptional activity (i.e. no mRNA+/−25 kb); (vii) is not in a copy number variable region; (viii) is in open chromatin; and/or (ix) is unique, with 1 copy in the human genome. In some embodiments, a genomic location listed in column 4 of Table 1 is located in or near (e.g., within 1, 2, 3, 4, 5, 10, 15, 20, 30, 40, 50, 75, 100, 150, 200, 300, 400, 500, 600, 700, 800, 900, 1000, 2000, 3000, 4000, 5000, or 10,000 nucleotides of) a genomic safe harbor site. In some embodiments, a genomic location listed in column 4 of Table 1 is at a position in the genome that meets 1, 2, 3, 4, 5, 6, 7, 8 or 9 of the following criteria: (i) is located >300 kb from a cancer-related gene; (ii) is >300 kb from a miRNA/other functional small RNA; (iii) is >50 kb from a 5′ gene end; (iv) is >50 kb from a replication origin; (v) is >50 kb away from any ultraconserved element; (vi) has low transcriptional activity (i.e. no mRNA+/−25 kb); (vii) is not in a copy number variable region; (viii) is in open chromatin; and/or (ix) is unique, with 1 copy in the human genome.

[0105] In embodiments, a cell or system as described herein comprises one or more of (e.g., 1, 2, or 3 of): (i) a recombinase polypeptide as listed in a single row of column 1 of Table 1 or 2, or an amino acid sequence having at least 70%, 75%, 80%, 85%, 90%, 95%, 96%, 97%, 98%, 99%, or 100% sequence identity thereto; (ii) an insert DNA comprising a DNA recognition sequence as listed in column 2 and the same row of Table 1, or a nucleic acid sequence having at least 70%, 75%, 80%, 85%, 90%, 95%, 96%, 97%, 98%, or 99% identity thereto, or having no more than 1, 2, 3, or 4 sequence alterations (e.g., substitutions, insertions, or deletions) relative thereto, optionally wherein the insert DNA further comprises an object sequence (e.g., a heterologous object sequence); and/or (iii) a genome comprising a human DNA recognition sequence sequence as listed in column 3 and the same row of Table 1, or a nucleic acid sequence having at least 70%, 75%, 80%, 85%, 90%, 95%, 96%, 97%, 98%, or 99% identity thereto, or having no more than 1, 2, 3, or 4 sequence alterations (e.g., substitutions, insertions, or deletions) relative thereto; preferably wherein the human DNA recognition sequence is located in the genome at the location listed in column 4 and the same row of Table 1 corresponding to the listing of the human DNA recognition sequence.

[0106] In some embodiments, the protein component(s) of a Gene Writing™ system as described herein may be pre-associated with a template (e.g., a DNA template). For example, in some embodiments, the Gene Writer™ polypeptide may be first combined with the DNA template to form a deoxyribonucleoprotein (DNP) complex. In some embodiments, the DNP may be delivered to cells via, e.g., transfection, nucleofection, virus, vesicle, LNP, exosome, fusosome. Additional description of DNP delivery is found, for example, in Guha and Calos J Mol Biol (2020), which is herein incorporated by reference in its entirety.

[0107] In some embodiments, a polypeptide described herein comprises one or more (e.g., 2, 3, 4, 5) nuclear targeting sequences, for example a nuclear localization sequence (NLS). In some embodiments, the NLS is a bipartite NLS. In some embodiments, an NLS facilitates the import of a protein comprising an NLS into the cell nucleus. In some embodiments, the NLS is fused to the N-terminus of a Gene Writer described herein. In some embodiments, the NLS is fused to the C-terminus of the Gene Writer. In some embodiments, the NLS is fused to the N-terminus or the C-terminus of a Cas domain. In some embodiments, a linker sequence is disposed between the NLS and the neighboring domain of the Gene Writer.

[0108] In some embodiments, an NLS comprises the amino acid sequence MDSLLMNRRKFLYQFKNVRWAKGRRETYLC (SEQ ID NO: 1822), PKKRKVEGADKRTADGSEFESPKKKRKV (SEQ ID NO: 1823), RKSGKIAAIWKRPRKPKKKRKV KRTADGSEFESPKKKRKV (SEQ ID NO: 1824), KKTELQTTNAENKTKKL (SEQ ID NO: 1825), or KRGINDRNFWRGENGRKTR (SEQ ID NO: 1826), KRPAATKKAGQAKKKK (SEQ ID NO: 1827), or a functional fragment or variant thereof. Exemplary NLS sequences are also described in PCT/EP2000/011690, the contents of which are incorporated herein by reference for their disclosure of exemplary nuclear localization sequences.

[0109] In some embodiments, the NLS is a bipartite NLS. A bipartite NLS typically comprises two basic amino acid clusters separated by a spacer sequence (which may be, e.g., about 10 amino acids in length). A monopartite NLS typically lacks a spacer. An example of a bipartite NLS is the nucleoplasmin NLS, having the sequence KR[PAATKKAGQA]KKKK (SEQ ID NO: 1828), wherein the spacer is bracketed. Another exemplary bipartite NLS has the sequence PKKKRKVEGADKRTADGSEFESPKKKRKV (SEQ ID NO: 1829). Exemplary NLSs are described in International Application WO2020051561, which is herein incorporated by reference in its entirety, including for its disclosures regarding nuclear localization sequences.

[0110] DNA Binding Domains

[0111] In some embodiments, a recombinase polypeptide (e.g., comprised in a system or cell as described herein), e.g., a tyrosine recombinase, comprises a DNA binding domain (e.g., a target binding domain or a template binding domain).

[0112] In some embodiments, a recombinase polypeptide described herein may be redirected to a defined target site in the human genome. In some embodiments, a recombinase described herein may be fused to a heterologous domain, e.g., a heterologous DNA binding domain. In some embodiments, a recombinase may be fused to a heterologous DNA binding domain, e.g., a DNA binding domain from a zinc finger, TAL, meganuclease, transcription factor, or sequence-guided DNA binding element. In some embodiments, a recombinase may be fused to a DNA binding domain from a sequence-guided DNA binding element, e.g., a CRISPR-associated (Cas) DNA binding element, e.g., a Cas9. In some embodiments, a DNA binding element fused to a recombinase domain may contain mutations inactivating other catalytic functions, e.g., mutations inactivating endonuclease activity, e.g., mutations creating an inactivated meganuclease or partially or completely inactivate Cas protein, e.g., mutations creating a nickase Cas9 or dead Cas9 (dCas9).

[0113] In some embodiments, a DNA binding domain comprises a Streptococcus pyogenes Cas9 (SpCas9) or a functional fragment or variant thereof. In some embodiments, the DNA binding domain comprises a modified SpCas9. In embodiments, the modified SpCas9 comprises a modification that alters protospacer-adjacent motif (PAM) specificity. In embodiments, the PAM has specificity for the nucleic acid sequence 5′-NGT-3′. In embodiments, the modified SpCas9 comprises one or more amino acid substitutions, e.g., at one or more of positions L1111, D1135, G1218, E1219, A1322, of R1335, e.g., selected from L1111R, D1135V, G1218R, E1219F, A1322R, R1335V. In embodiments, the modified SpCas9 comprises the amino acid substitution T1337R and one or more additional amino acid substitutions, e.g., selected from L1111, D1135L, S1136R, G1218S, E1219V, D1332A, D1332S, D1332T, D1332V, D1332L, D1332K, D1332R, R1335Q, T1337, T1337L, T1337Q, T1337I, T1337V, T1337F, T1337S, T1337N, T1337K, T1337H, T1337Q, and T1337M, or corresponding amino acid substitutions thereto. In embodiments, the modified SpCas9 comprises: (i) one or more amino acid substitutions selected from D1135L, S1136R, G1218S, E1219V, A1322R, R1335Q, and T1337; and (ii) one or more amino acid substitutions selected from L1111R, G1218R, E1219F, D1332A, D1332S, D1332T, D1332V, D1332L, D1332K, D1332R, T1337L, T1337I, T1337V, T1337F, T1337S, T1337N, T1337K, T1337R, T1337H, T1337Q, and T1337M, or corresponding amino acid substitutions thereto.

[0114] In some embodiments, the DNA binding domain comprises a Cas domain, e.g., a Cas9 domain. In embodiments, the DNA binding domain comprises a nuclease-active Cas domain, a Cas nickase (nCas) domain, or a nuclease-inactive Cas (dCas) domain. In embodiments, the DNA binding domain comprises a nuclease-active Cas9 domain, a Cas9 nickase (nCas9) domain, or a nuclease-inactive Cas9 (dCas9) domain. In some embodiments, the DNA binding domain comprises a Cas9 domain of Cas9 (e.g., dCas9 and nCas9), Cas12a/Cpf1, Cas12b/C2c1, Cas12c/C2c3, Cas12d/CasY, Cas12e/CasX, Cas12g, Cas12h, or Cas12i. In some embodiments, the DNA binding domain comprises a Cas9 (e.g., dCas9 and nCas9), Cas12a/Cpf1, Cas12b/C2c1, Cas12c/C2c3, Cas12d/CasY, Cas12e/CasX, Cas12g, Cas12h, or Cas12i. In some embodiments, the DNA binding domain comprises an S. pyogenes or an S. thermophilus Cas9, or a functional fragment thereof. In some embodiments, the DNA binding domain comprises a Cas9 sequence, e.g., as described in Chylinski, Rhun, and Charpentier (2013) RNA Biology 10:5, 726-737; incorporated herein by reference. In some embodiments, the DNA binding domain comprises the HNH nuclease subdomain and/or the RuvC1 subdomain of a Cas, e.g., Cas9, e.g., as described herein, or a variant thereof. In some embodiments, the DNA binding domain comprises Cas12a/Cpf1, Cas12b/C2c1, Cas12c/C2c3, Cas12d/CasY, Cas12e/CasX, Cas12g, Cas12h, or Cas12i. In some embodiments, the DNA binding domain comprises a Cas polypeptide (e.g., enzyme), or a functional fragment thereof. In embodiments, the Cas polypeptide (e.g., enzyme) is selected from Cas1, Cas1B, Cas2, Cas3, Cas4, Cas5, Cas5d, Cas5t, Cas5h, Cas5a, Cas6, Cas7, Cas8, Cas8a, Cas8b, Cas8c, Cas9 (e.g., Csn1 or Csx12), Cas10, Cas10d, Cas12a/Cpf1, Cas12b/C2c1, Cas12c/C2c3, Cas12d/CasY, Cas12e/CasX, Cas12g, Cas12h, Cas12i, Csy1, Csy2, Csy3, Csy4, Cse1, Cse2, Cse3, Cse4, Cse5e, Csc1, Csc2, Csa5, Csn1, Csn2, Csm1, Csm2, Csm3, Csm4, Csm5, Csm6, Cmr1, Cmr3, Cmr4, Cmr5, Cmr6, Csb1, Csb2, Csb3, Csx17, Csx14, Csx10, Csx16, CsaX, Csx3, Csx1, Csx1S, Csx11, Csf1, Csf2, CsO, Csf4, Csd1, Csd2, Cst1, Cst2, Csh1, Csh2, Csa1, Csa2, Csa3, Csa4, Csa5, Type II Cas effector proteins, Type V Cas effector proteins, Type VI Cas effector proteins, CARF, DinG, Cpf1, Cas12b/C2c1, Cas12c/C2c3, Cas12b/C2c1, Cas12c/C2c3, SpCas9(K855A), eSpCas9(1.1), SpCas9-HF1, hyper accurate Cas9 variant (HypaCas9), homologues thereof, modified or engineered versions thereof, and/or functional fragments thereof. In embodiments, the Cas9 comprises one or more substitutions, e.g., selected from H840A, D10A, P475A, W476A, N477A, D1125A, W1126A, and D1127A. In embodiments, the Cas9 comprises one or more mutations at positions selected from: D10, G12, G17, E762, H840, N854, N863, H982, H983, A984, D986, and/or A987, e.g., one or more substitutions selected from D10A, G12A, G17A, E762A, H840A, N854A, N863A, H982A, H983A, A984A, and/or D986A. In some embodiments, the DNA binding domain comprises a Cas (e.g., Cas9) sequence from Corynebacterium ulcerans, Corynebacterium diphtheria, Spiroplasma syrphidicola, Prevotella intermedia, Spiroplasma taiwanense, Streptococcus iniae, Belliella baltica, Psychroflexus torquis, Streptococcus thermophilus, Listeria innocua, Campylobacter jejuni, Neisseria meningitidis, Streptococcus pyogenes, or Staphylococcus aureus, or a fragment or variant thereof.

[0115] In some embodiments, the DNA binding domain comprises a Cpf1 domain, e.g., comprising one or more substitutions, e.g., at position D917, E1006A, D1255 or any combination thereof, e.g., selected from D917A, E1006A, D1255A, D917A/E1006A, D917A/D1255A, E1006A/D1255A, and D917A/E1006A/D1255A.

[0116] In some embodiments, the DNA binding domain comprises spCas9, spCas9-VRQR, spCas9-VRER, xCas9 (sp), saCas9, saCas9-KKH, spCas9-MQKSER, spCas9-LRKIQK, or spCas9-LRVSQL.

[0117] In some embodiments, the DNA-binding domain comprises an amino acid sequence as listed in Table 3 below, or an amino acid sequence having at least 80%, 85%, 90%, 95%, 96%, 97%, 98%, or 99% sequence identity thereto. In some embodiments, the DNA-binding domain comprises an amino acid sequence that has no more than 1, 2, 3, 4, 5, 6, 7, 8, 9, 10, 11, 12, 13, 14, 15, 16, 17, 18, 19, 20, 21, 22, 23, 24, 25, 26, 27, 28, 29, 30, 31, 32, 33, 34, 35, 36, 37, 38, 39, 40, 41, 42, 43, 44, 45, 46, 47, 48, 49, or 50 differences (e.g., mutations) relative to any of the amino acid sequences described herein.

TABLE 3
Each of the Reference Sequences are incorporated by reference in their entirety

| Name | Amino Acid Sequence or Reference Sequence |
|---|---|
| Streptococcus pyogenes | |
| Cas9 | |
| Exemplary Linker | SGSETPGTSESATPES (SEQ ID NO: 1830) |
| Exemplary Linker Motif | (SGGS)ₙ (SEQ ID NO: 1831) |
| Exemplary Linker Motif | (GGGS)ₙ (SEQ ID NO: 1832) |
| Exemplary Linker Motif | (GGGGS)ₙ (SEQ ID NO: 1833) |
| Exemplary Linker Motif | (G)ₙ |
| Exemplary Linker Motif | (EAAAK)ₙ (SEQ ID NO: 1834) |
| Exemplary Linker Motif | (GGS)ₙ |
| Exemplary Linker Motif | (XP)ₙ |
| Cas9 from Streptococcus | NCBI Reference Sequence: NC_002737.2 and Uniprot |
| pyogenes | Reference Sequence: Q99ZW2 |
| Cas9 from Corynebacterium | NCBI Refs: NC_015683.1, NC_017317.1 |
| ulcerans | |
| Cas9 from Corynebacterium | NCBI Refs: NC_016782.1, NC_016786.1 |
| diphtheria | |
| Cas9 from Spiroplasma | NCBI Ref: NC_021284.1 |
| syrphidicola | |
| Cas9 from Prevotella | NCBI Ref: NC_017861.1 |
| intermedia | |
| Cas9 from Spiroplasma | NCBI Ref: NC_021846.1 |
| taiwanense | |
| Cas9 from Streptococcus | NCBI Ref: NC_021314.1 |
| iniae | |
| Cas9 from Belliella baltica | NCBI Ref: NC_018010.1 |
| Cas9 from Psychroflexus | NCBI Ref: NC_018721.1 |
| torquisI | |
| Cas9 from Streptococcus | NCBI Ref: YP_820832.1 |
| thermophilus | |
| Cas9 from Listeria innocua | NCBI Ref: NP_472073.1 |
| Cas9 from Campylobacter | NCBI Ref: YP_002344900.1 |
| jejuni | |
| Cas9 from Neisseria | NCBI Ref: YP_002342100.1 |
| meningitidis | |
| dCas9 (D10A and H840A) | |
| Catalytically inactive Cas9 | |
| (dCas9) | |
| Cas9 nickase (nCas9) | |
| Catalytically active Cas9 | |
| CasY | ((ncbi.nlm.nih.gov/protein/APG80656.1) |
| | >APG80656.1 CRISPR-associated protein CasY [uncultured |
| | Parcubacteria group bacterium]) |
| CasX | uniprot.org/uniprot/F0NN87; uniprot.org/uniprot/F0NH53 |
| CasX | >tr\|F0NH53\|F0NH53_SULIR CRISPR associated protein, Casx |
| | OS = Sulfolobus islandicus (strain REY15A) GN = SiRe_0771 |
| | PE = 4 SV = 1 |
| Deltaproteobacteria CasX | |
| Cas12b/C2c1 | ((uniprot.org/uniprot/T0D7A2#2) sp\|T0D7A2\|C2C1_ALIAG |
| | CRISPR- associated endonuclease C2c1 OS = Alicyclobacillus |
| | acido-terrestris (strain ATCC 49025/DSM 3922/CIP 106132/ |
| | NCIMB 13137/GD3B) GN = c2c1 PE = 1 SV = 1) |
| BhCas12b (Bacillus | NCBI Reference Sequence: WP_095142515 |
| hisashii) | |
| BvCas12b (Bacillus sp. V3- | NCBI Reference Sequence: WP_101661451.1 |
| 13) | |
| Wild-type Francisella | |
| novicida Cpf1 | |
| Francisella novicida Cpf1 | |
| D917A | |
| Francisella novicida Cpf1 | |
| E1006A | |
| Francisella novicida Cpf1 | |
| D1255A | |
| Francisella novicida Cpf1 | |
| D917A/E1006A | |
| Francisella novicida Cpf1 | |
| D917A/D1255A | |
| Francisella novicida Cpf1 | |
| E1006A/D1255A | |
| Francisella novicida Cpf1 | |
| D917A/E1006A | |
| SaCas9 | |
| SaCas9n | |
| PAM-binding SpCas9 | |
| PAM-binding SpCas9n | |
| PAM-binding SpEQR Cas9 | |
| PAM-binding SpVQR Cas9 | |
| PAM-binding SpVRER | |
| Cas9 | |
| PAM-binding SpVRQR | |
| Cas9 | |
| SpyMacCas9 | |

[0118] In some embodiments, the Cas polypeptide binds a gRNA that directs DNA binding. In some embodiments, the gRNA comprises, e.g., from 5′ to 3′ (1) a gRNA spacer; (2) a gRNA scaffold. In some embodiments:
[0119] (1) Is a Cas9 spacer of ˜18-22 nt, e.g., is 20 nt
[0120] (2) Is a gRNA scaffold comprising one or more hairpin loops, e.g., 1, 2, of 3 loops for associating the template with a nickase Cas9 domain. In some embodiments, the gRNA scaffold carries the sequence, from 5′ to 3′,

(SEQ ID NO: 1835)
GTTTTAGAGCTAGAAATAGCAAGTTAAAATAAGGCTAGTCCGTTATCAA
CTTGAAAAAGTGGGACCGAGTCGGTCC.

[0121] In some embodiments, a Gene Writing system described herein is used to make an edit in HEK293, K562, U20S, or HeLa cells. In some embodiment, a Gene Writing system is used to make an edit in primary cells, e.g., primary cortical neurons from E18.5 mice.

[0122] In some embodiments, a system or method described herein involves a CRISPR DNA targeting enzyme or system described in US Pat. App. Pub. No. 20200063126, 20190002889, or 20190002875 (each of which is incorporated by reference herein in its entirety) or a functional fragment or variant thereof. For instance, in some embodiments, a GeneWriter polypeptide or Cas endonuclease described herein comprises a polypeptide sequence of any of the applications mentioned in this paragraph, and in some embodiments a guide RNA comprises a nucleic acid sequence of any of the applications mentioned in this paragraph.

[0123] In some embodiments, the DNA binding domain (e.g., a target binding domain or a template binding domain) comprises a meganuclease domain, or a functional fragment thereof. In some embodiments, the meganuclease domain possesses endonuclease activity, e.g., double-strand cleavage and/or nickase activity. In other embodiments, the meganuclease domain has reduced activity, e.g., lacks endonuclease activity, e.g., the meganuclease is catalytically inactive. In some embodiments, a catalytically inactive meganuclease is used as a DNA binding domain, e.g., as described in Fonfara et al. Nucleic Acids Res 40(2):847-860 (2012), incorporated herein by reference in its entirety. In embodiments, the DNA binding domain comprises one or more modifications relative to a wild-type DNA binding domain, e.g., a modification via directed evolution, e.g., phage-assisted continuous evolution (PACE).

[0124] Inteins

[0125] In some embodiments, as described in more detail below, Intein-N may be fused to the N-terminal portion of a polypeptide (e.g., a Gene Writer polypeptide) described herein, e.g., at a first domain. In embodiments, intein-C may be fused to the C-terminal portion of the polypeptide described herein (e.g., at a second domain), e.g., for the joining of the N-terminal portion to the C-terminal portion, thereby joining the first and second domains. In some embodiments, the first and second domains are each independently chosen from a DNA binding domain and a catalytic domain, e.g., a recombinase domain. In some embodiments, a single domain is split using the intein strategy described herein, e.g., a DNA binding domain, e.g., a dCas9 domain.

[0126] In some embodiments, a system or method described herein involves an intein that is a self-splicing protein intron (e.g., peptide), e.g., which ligates flanking N-terminal and C-terminal exteins (e.g., fragments to be joined). An intein may, in some instances, comprise a fragment of a protein that is able to excise itself and join the remaining fragments (the exteins) with a peptide bond in a process known as protein splicing. Inteins are also referred to as “protein inons.” The process of an intein excising itself and joining the remaining portions of the protein is herein termed “protein splicing” or “intein-mediated protein splicing.” In some embodiments, an intein of a precursor protein (an intein containing protein prior to intein-mediated protein splicing) comes from two genes. Such intein is referred to herein as a split intein (e.g., split intein-N and split intein-C). For example, in cyanobacteria, DnaE, the catalytic subunit a of DNA polymerase III, is encoded by two separate genes, dnaE-n and dnaE-c. The intein encoded by the dnaE-n gene may be herein referred as “intein-N.” The intein encoded by the dnaE-c gene may be herein referred as “intein-C.”

[0127] Use of inteins for joining heterologous protein fragments is described, for example, in Wood et al., J. Biol. Chem. 289(21); 14512-9 (2014) (incorporated herein by reference in its entirety). For example, when fused to separate protein fragments, the inteins IntN and IntC may recognize each other, splice themselves out, and/or simultaneously ligate the flanking N- and C-terminal exteins of the protein fragments to which they were fused, thereby reconstituting a full-length protein from the two protein fragments.

[0128] In some embodiments, a synthetic intein based on the dnaE intein, the Cfa-N (e.g., split intein-N) and Cfa-C (e.g., split intein-C) intein pair, is used. Examples of such inteins have been described, e.g., in Stevens et al., J Am Chem Soc. 2016 Feb. 24; 138(7):2162-5 (incorporated herein by reference in its entirety). Non-limiting examples of intein pairs that may be used in accordance with the present disclosure include: Cfa DnaE intein, Ssp GyrB intein, Ssp DnaX intein, Ter DnaE3 intein, Ter ThyX intein, Rma DnaB intein and Cne Prp8 intein (e.g., as described in U.S. Pat. No. 8,394,604, incorporated herein by reference.

[0129] In some embodiments, Intein-N and intein-C may be fused to the N-terminal portion of the split Cas9 and the C-terminal portion of a split Cas9, respectively, for the joining of the N-terminal portion of the split Cas9 and the C-terminal portion of the split Cas9. For example, in some embodiments, an intein-N is fused to the C-terminus of the N-terminal portion of the split Cas9, i.e., to form a structure of N—[N-terminal portion of the split Cas9]-[intein-N]˜C. In some embodiments, an intein-C is fused to the N-terminus of the C-terminal portion of the split Cas9, i.e., to form a structure of N-[intein-C]˜[C-terminal portion of the split Cas9]-C. The mechanism of intein-mediated protein splicing for joining the proteins the inteins are fused to (e.g., split Cas9) is described in Shah et al., Chem Sci. 2014; 5(1):446-461, incorporated herein by reference. Methods for designing and using inteins are known in the art and described, for example by WO2020051561, WO2014004336, WO2017132580, US20150344549, and US20180127780, each of which is incorporated herein by reference in their entirety.

[0130] In some embodiments, a split refers to a division into two or more fragments. In some embodiments, a split Cas9 protein or split Cas9 comprises a Cas9 protein that is provided as an N-terminal fragment and a C-terminal fragment encoded by two separate nucleotide sequences. The polypeptides corresponding to the N-terminal portion and the C-terminal portion of the Cas9 protein may be spliced to form a reconstituted Cas9 protein. In embodiments, the Cas9 protein is divided into two fragments within a disordered region of the protein, e.g., as described in Nishimasu et al., Cell, Volume 156, Issue 5, pp. 935-949, 2014, or as described in Jiang et al. (2016) Science 351: 867-871 and PDB file: 5F9R (each of which is incorporated herein by reference in its entirety). A disordered region may be determined by one or more protein structure determination techniques known in the art, including, without limitation, X-ray crystallography, NMR spectroscopy, electron microscopy (e.g., cryoEM), and/or in silico protein modeling. In some embodiments, the protein is divided into two fragments at any C, T, A, or S, e.g., within a region of SpCas9 between amino acids A292-G364, F445-K483, or E565-T637, or at corresponding positions in any other Cas9, Cas9 variant (e.g., nCas9, dCas9), or other napDNAbp. In some embodiments, protein is divided into two fragments at SpCas9 T310, T313, A456, S469, or C574. In some embodiments, the process of dividing the protein into two fragments is referred to as splitting the protein.

[0131] In some embodiments, a protein fragment ranges from about 2-1000 amino acids (e.g., between 2-10, 10-50, 50-100, 100-200, 200-300, 300-400, 400-500, 500-600, 600-700, 700-800, 800-900, or 900-1000 amino acids) in length. In some embodiments, a protein fragment ranges from about 5-500 amino acids (e.g., between 5-10, 10-50, 50-100, 100-200, 200-300, 300-400, or 400-500 amino acids) in length. In some embodiments, a protein fragment ranges from about 20-200 amino acids (e.g., between 20-30, 30-40, 40-50, 50-100, or 100-200 amino acids) in length.

[0132] In some embodiments, a portion or fragment of a Gene Writer polypeptide, e.g., as described herein, is fused to an intein. The nuclease can be fused to the N-terminus or the C-terminus of the intein. In some embodiments, a portion or fragment of a fusion protein is fused to an intein and fused to an AAV capsid protein. The intein, nuclease and capsid protein can be fused together in any arrangement (e.g., nuclease-intein-capsid, intein-nuclease-capsid, capsid-intein-nuclease, etc.). In some embodiments, the N-terminus of an intein is fused to the C-terminus of a fusion protein and the C-terminus of the intein is fused to the N-terminus of an AAV capsid protein.

[0133] In some embodiments, a Gene Writer polypeptide (e.g., comprising a nickase Cas9 domain) is fused to intein-N and a polypeptide comprising a polymerase domainis fused to an intein-C.

[0134] Exemplary nucleotide and amino acid sequences of interns are provided below:

DnaE Intein-N DNA:
(SEQ ID NO: 1836)
TGCCTGTCATACGAAACCGAGATACTGACAGTAGAATATGGCCTTCTGCCAATCGGG
AAGATTGTGGAGAAACGGATAGAATGCACAGTTTACTCTGTCGATAACAATGGTAA
CATTTATACTCAGCCAGTTGCCCAGTGGCACGACCGGGGAGAGCAGGAAGTATTCG
AATACTGTCTGGAGGATGGAAGTCTCATTAGGGCCACTAAGGACCACAAATTTATG
ACAGTCGATGGCCAGATGCTGCCTATAGACGAAATCTTTGAGCGAGAGTTGGACCTC
ATGCGAGTTGACAACCTTCCTAAT
DnaE Intein-N Protein:
(SEQ ID NO: 1837)
CLSYETEILTVEYGLLPIGKIVEKRIECTVYSVDNNGNIYTQPVAQWHDRGEQEVFEYCL
EDGSLIRATKDHKFMTVDGQMLPIDEIFERELDLMRVDNLPN
DnaE Intein-C DNA:
(SEQ ID NO: 1838)
ATGATCAAGATAGCTACAAGGAAGTATCTTGGCAAACAAAACGTTTATGATATTGG
AGTCGAAAGAGATCACAACTTTGCTCTGAAGAACGGATTCATAGCTTCTAAT
Intein-C:
(SEQ ID NO: 1839)
MIKIATRKYLGKQNVYDIGVERDHNFALKNGFIASN
Cfa-N DNA:
(SEQ ID NO: 1840)
TGCCTGTCTTATGATACCGAGATACTTACCGTTGAATATGGCTTCTTGCCTATTGGAA
AGATTGTCGAAGAGAGAATTGAATGCACAGTATATACTGTAGACAAGAATGGTTTC
GTTTACACACAGCCCATTGCTCAATGGCACAATCGCGGCGAACAAGAAGTATTTGA
GTACTGTCTCGAGGATGGAAGCATCATACGAGCAACTAAAGATCATAAATTCATGA
CCACTGACGGGCAGATGTTGCCAATAGATGAGATATTCGAGCGGGGCTTGGATCTC
AAACAAGTGGATGGATTGCCA
Cfa-N Protein:
(SEQ ID NO: 1841)
CLSYDTEILTVEYGFLPIGKIVEERIECTVYTVDKNGFVYTQPIAQWHNRGEQEVFEYCL
EDGSIIRATKDHKFMTTDGQMLPIDEIFERGLDLKQVDGLP
Cfa-C DNA:
(SEQ ID NO: 1842)
ATGAAGAGGACTGCCGATGGATCAGAGTTTGAATCTCCCAAGAAGAAGAGGAAAGT
AAAGATAATATCTCGAAAAAGTCTTGGTACCCAAAATGTCTATGATATTGGAGTGGA
GAAAGATCACAACTTCCTTCTCAAGAACGGTCTCGTAGCCAGCAAC
Cfa-C Protein:
(SEQ ID NO: 1843)
MKRTADGSEFESPKKKRKVKIISRKSLGTQNVYDIGVEKDHNFLLKNGLVASN

[0135] Insert DNAs

[0136] In some embodiments, an insert DNA as described herein comprises a nucleic acid sequence that can be integrated into a target DNA molecule, e.g., by a recombinase polypeptide (e.g., a tyrosine recombinase polypeptide), e.g., as described herein. The insert DNA typically is able to bind one or more recombinase polypeptides (e.g., a plurality of copies of a recombinase polypeptide) of the system. In some embodiments the insert DNA comprises a region that is capable of binding a recombinase polypeptide (e.g., a recognition sequence as described herein).

[0137] An insert DNA may, in some embodiments, comprise an object sequence for insertion into a target DNA. The object sequence may be coding or non-coding. In some embodiments, the object sequence may contain an open reading frame. In some embodiments the insert DNA comprises a Kozak sequence. In some embodiments the insert DNA comprises an internal ribosome entry site. In some embodiments the insert DNA comprises a self-cleaving peptide such as a T2A or P2A site. In some embodiments the insert DNA comprises a start codon. In some embodiments the insert DNA comprises a splice acceptor site. In some embodiments the insert DNA comprises a splice donor site. In some embodiments the insert DNA comprises a microRNA binding site, e.g., downstream of the stop codon. In some embodiments the insert DNA comprises a polyA tail, e.g., downstream of the stop codon of an open reading frame. In some embodiments the insert DNA comprises one or more exons. In some embodiments the insert DNA comprises one or more introns. In some embodiments the insert DNA comprises a eukaryotic transcriptional terminator. In some embodiments the insert DNA comprises an enhanced translation element or a translation enhancing element. In some embodiments the insert DNA comprises a microRNA sequence, a siRNA sequence, a guide RNA sequence, a piwi RNA sequence. In some embodiments the insert DNA comprises a gene expression unit composed of at least one regulatory region operably linked to an effector sequence. The effector sequence may be a sequence that is transcribed into RNA (e.g., a coding sequence or a non-coding sequence such as a sequence encoding a micro RNA). In some embodiments, the object sequence may contain a non-coding sequence. For example, the insert DNA may comprise a promoter or enhancer sequence. In some embodiments the insert DNA comprises a tissue specific promoter or enhancer, each of which may be unidirectional or bidirectional. In some embodiments the promoter is an RNA polymerase I promoter, RNA polymerase II promoter, or RNA polymerase III promoter. In some embodiments the promoter comprises a TATA element. In some embodiments the promoter comprises a B recognition element. In some embodiments the promoter has one or more binding sites for transcription factors.

[0138] In some embodiments the object sequence of the insert DNA is inserted into a target genome in an endogenous intron. In some embodiments the object sequence of the insert DNA is inserted into a target genome and thereby acts as a new exon. In some embodiments the insertion of the object sequence into the target genome results in replacement of a natural exon or the skipping of a natural exon. In some embodiments the object sequence of the insert DNA is inserted into the target genome in a genomic safe harbor site, such as AAVS1, CCR5, or ROSA26. In some embodiment the object sequence of the insert DNA is added to the genome in an intergenic or intragenic region. In some embodiments the object sequence of the insert DNA is added to the genome 5′ or 3′ within 0.1 kb, 0.25 kb, 0.5 kb, 0.75, kb, 1 kb, 2 kb, 3 kb, 4 kb, 5 kb, 7.5 kb, 10 kb, 15 kb, 20 kb, 25 kb, 50, 75 kb, or 100 kb of an endogenous active gene. In some embodiments the object sequence of the insert DNA is added to the genome 5′ or 3′ within 0.1 kb, 0.25 kb, 0.5 kb, 0.75, kb, 1 kb, 2 kb, 3 kb, 4 kb, 5 kb, 7.5 kb, 10 kb, 15 kb, 20 kb, 25 kb, 50, 75 kb, or 100 kb of an endogenous promoter or enhancer. In some embodiments the object sequence of the insert DNA can be, e.g., 50-50,000 base pairs (e.g., between 50-40,000 bp, between 500-30,000 bp between 500-20,000 bp, between 100-15,000 bp, between 500-10,000 bp, between 50-10,000 bp, between 50-5,000 bp. In some embodiments the object sequence of the insert DNA can be, e.g., 1-50 base pairs (e.g., between 1-10, 10-20, 20-30, 30-40, or 40-50 base pairs).

[0139] In certain embodiments, an insert DNA can be identified, designed, engineered and constructed to contain sequences altering or specifying the genome function of a target cell or target organism, for example by introducing a heterologous coding region into a genome; affecting or causing exon structure/alternative splicing; causing disruption of an endogenous gene; causing transcriptional activation of an endogenous gene; causing epigenetic regulation of an endogenous DNA; causing up- or down-regulation of operably liked genes, etc. In certain embodiments, an insert DNA can be engineered to contain sequences coding for exons and/or transgenes, provide for binding sites to transcription factor activators, repressors, enhancers, etc., and combinations of thereof. In other embodiments, the coding sequence can be further customized with splice acceptor sites, poly-A tails.

[0140] The insert DNA may have some homology to the target DNA. In some embodiments the insert DNA has at least 3, 4, 5, 6, 7, 8, 9, 10 or more bases of exact homology to the target DNA or a portion thereof. In some embodiments, the insert DNA has at least 10, 15, 20, 25, 30, 40, 50, 60, 80, 100, 120, 140, 160, 180, 200 or more bases of at least 50%, 60%, 70%, 80%, 85%, 90%, 95%, 97%, 98%, 99% or 100% homology to the target DNA, or a portion thereof.

[0141] As an alternative to other methods of delivery described herein, in some embodiments, a nucleic acid (e.g., encoding a recombinase, or a template nucleic acid, or both) delivered to cells is designed as a minicircle, where plasmid backbone sequences not pertaining to Gene Writing™ are removed before administration to cells. Minicircles have been shown to result in higher transfection efficiencies and gene expression as compared to plasmids with backbones containing bacterial parts (e.g., bacterial origin of replication, antibiotic selection cassette) and have been used to improve the efficiency of transposition (Sharma et al. Mol Ther Nucleic Acids 2:E74 (2013)). In some embodiments, the DNA vector encoding the Gene Writer™ polypeptide is delivered as a minicircle. In some embodiments, the DNA vector containing the Gene Writer™ template is delivered as a minicircle. In some embodiments of such alternative means for delivering a nucleic acid, the bacterial parts are flanked by recombination sites, e.g., attP/attB, loxP, FRT sites. In some embodiments, the addition of a cognate recombinase results in intramolecular recombination and excision of the bacterial parts. In some embodiments, the recombinase sites are recognized by phiC31 recombinase. In some embodiments, the recombinase sites are recognized by Cre recombinase. In some embodiments, the recombinase sites are recognized by FLP recombinase. In some embodiments, minicircles are generated in a bacterial production strain, e.g., an E. coli strain stably expressing inducible minicircle assembling enzymes, e.g., a producer strain as according to Kay et al. Nat Biotechnol 28(12):1287-1289 (2010). Minicircle DNA vector preparations and methods of production are described in U.S. Pat. No. 9,233,174, incorporated herein by reference in its entirety.

[0142] In addition to plasmid DNA, minicircles can be generated by excising the desired construct, e.g., recombinase expression cassette or therapeutic expression cassette, from a viral backbone, e.g., an AAV vector. Previously, it has been shown that excision and circularization of the insert DNA sequence from a viral backbone may be important for transposase-mediated integration efficiency (Yant et al. Nat Biotechnol 20(10):999-1005 (2002)). In some embodiments, minicircles are first formulated and then delivered to target cells. In other embodiments, minicircles are formed from a DNA vector (e.g., plasmid DNA, rAAV, scAAV, ceDNA, doggybone DNA) intracellularly by co-delivery of a recombinase, resulting in excision and circularization of the recombinase recognition site-flanked nucleic acid, e.g., a nucleic acid encoding the Gene Writer™ polypeptide, or DNA template, or both. In some embodiments, the same recombinase is used for a first excision event (e.g., intramolecular recombination) and a second integration (e.g., target site integration) event. In some embodiments, the recombination site on an excised circular DNA (e.g., after a first recombination event, e.g., intramolecular recombination) is used as the template recognition site for a second recombination (e.g., target site integration) event.

[0143] Linkers

[0144] In some embodiments, domains of the compositions and systems described herein (e.g., the recombinase domain and/or DNA recognition domains of a recombinase polypeptide, e.g., as described herein) may be joined by a linker. A composition described herein comprising a linker element has the general form S1-L-S2, wherein S1 and S2 may be the same or different and represent two domain moieties (e.g., each a polypeptide or nucleic acid domain) associated with one another by the linker. In some embodiments, a linker may connect two polypeptides. In some embodiments, a linker may connect two nucleic acid molecules. In some embodiments, a linker may connect a polypeptide and a nucleic acid molecule. A linker may be a chemical bond, e.g., one or more covalent bonds or non-covalent bonds. A linker may be flexible, rigid, and/or cleavable. In some embodiments, the linker is a peptide linker. Generally, a peptide linker is at least 2, 3, 4, 5, 6, 7, 8, 9, 10 or more amino acids in length, e.g., 2-50 amino acids in length, 2-30 amino acids in length.

[0145] The most commonly used flexible linkers have sequences consisting primarily of stretches of Gly and Ser residues (“GS” linker). Flexible linkers may be useful for joining domains that require a certain degree of movement or interaction and may include small, non-polar (e.g. Gly) or polar (e.g. Ser or Thr) amino acids. Incorporation of Ser or Thr can also maintain the stability of the linker in aqueous solutions by forming hydrogen bonds with the water molecules, and therefore reduce unfavorable interactions between the linker and the other moieties. Examples of such linkers include those having the structure [GGS]^{≥1} or [GGGS]^{≥1} (SEQ ID NO: 1844). Rigid linkers are useful to keep a fixed distance between domains and to maintain their independent functions. Rigid linkers may also be useful when a spatial separation of the domains is critical to preserve the stability or bioactivity of one or more components in the agent. Rigid linkers may have an alpha helix-structure or Pro-rich sequence, (XP)n, with X designating any amino acid, preferably Ala, Lys, or Glu. Cleavable linkers may release free functional domains in vivo. In some embodiments, linkers may be cleaved under specific conditions, such as the presence of reducing reagents or proteases. In vivo cleavable linkers may utilize the reversible nature of a disulfide bond. One example includes a thrombin-sensitive sequence (e.g., PRS) between the two Cys residues. In vitro thrombin treatment of CPRSC results in the cleavage of the thrombin-sensitive sequence, while the reversible disulfide linkage remains intact. Such linkers are known and described, e.g., in Chen et al. 2013. Fusion Protein Linkers: Property, Design and Functionality. Adv Drug Deliv Rev. 65(10): 1357-1369. In vivo cleavage of linkers in compositions described herein may also be carried out by proteases that are expressed in vivo under pathological conditions (e.g. cancer or inflammation), in specific cells or tissues, or constrained within certain cellular compartments. The specificity of many proteases offers slower cleavage of the linker in constrained compartments.

[0146] In some embodiments the amino acid linkers are (or are homologous to) the endogenous amino acids that exist between such domains in a native polypeptide. In some embodiments the endogenous amino acids that exist between such domains are substituted but the length is unchanged from the natural length. In some embodiments, additional amino acid residues are added to the naturally existing amino acid residues between domains.

[0147] In some embodiments, the amino acid linkers are designed computationally or screened to maximize protein function (Anad et al., FEBS Letters, 587:19, 2013).

### Genomic Safe Harbor Sites

[0148] In some embodiments, a Gene Writer targets a genomic safe harbor site (e.g., directs insertion of a heterologous object sequence into a position having a safe harbor score of at least 3, 4, 5, 6, 7, or 8). In some embodiments the genomic safe harbor site is a Natural Harbor™ site. In some embodiments, a Natural Harbor™ site is derived from the native target of a mobile genetic element, e.g., a recombinase, transposon, retrotransposon, or retrovirus. The native targets of mobile elements may serve as ideal locations for genomic integration given their evolutionary selection. In some embodiments the Natural Harbor™ site is ribosomal DNA (rDNA). In some embodiments the Natural Harbor™ site is 5S rDNA, 18S rDNA, 5.8S rDNA, or 28S rDNA. In some embodiments the Natural Harbor™ site is the Mutsu site in 5S rDNA. In some embodiments the Natural Harbor™ site is the R2 site, the R5 site, the R6 site, the R4 site, the R1 site, the R9 site, or the RT site in 28S rDNA. In some embodiments the Natural Harbor™ site is the R8 site or the R7 site in 18S rDNA. In some embodiments the Natural Harbor™ site is DNA encoding transfer RNA (tRNA). In some embodiments the Natural Harbor™ site is DNA encoding tRNA-Asp or tRNA-Glu. In some embodiments the Natural Harbor™ site is DNA encoding spliceosomal RNA. In some embodiments the Natural Harbor™ site is DNA encoding small nuclear RNA (snRNA) such as U2 snRNA.

[0149] Thus, in some aspects, the present disclosure provides a method comprising comprises using a GeneWriter system described herein to insert a heterologous object sequence into a Natural Harbor™ site. In some embodiments, the Natural Harbor™ site is a site described in Table 4 below. In some embodiments, the heterologous object sequence is inserted within 20, 50, 100, 150, 200, 250, 500, or 1000 base pairs of the Natural Harbor™ site. In some embodiments, the heterologous object sequence is inserted within 0.1 kb, 0.25 kb, 0.5 kb, 0.75, kb, 1 kb, 2 kb, 3 kb, 4 kb, 5 kb, 7.5 kb, 10 kb, 15 kb, 20 kb, 25 kb, 50, 75 kb, or 100 kb of the Natural Harbor™ site. In some embodiments, the heterologous object sequence is inserted into a site having at least 70%, 75%, 80%, 85%, 90%, 95%, 96%, 97%, 98%, or 99% identity to a sequence shown in Table 4. In some embodiments, the heterologous object sequence is inserted within 20, 50, 100, 150, 200, 250, 500, or 1000 base pairs, or within 0.1 kb, 0.25 kb, 0.5 kb, 0.75, kb, 1 kb, 2 kb, 3 kb, 4 kb, 5 kb, 7.5 kb, 10 kb, 15 kb, 20 kb, 25 kb, 50, 75 kb, or 100 kb, of a site having at least 70%, 75%, 80%, 85%, 90%, 95%, 96%, 97%, 98%, or 99% identity to a sequence shown in Table 4. In some embodiments, the heterologous object sequence is inserted within a gene indicated in Column 5 of Table 4, or within 20, 50, 100, 150, 200, 250, 500, or 1000 base pairs, or within 0.1 kb, 0.25 kb, 0.5 kb, 0.75, kb, 1 kb, 2 kb, 3 kb, 4 kb, 5 kb, 7.5 kb, 10 kb, 15 kb, 20 kb, 25 kb, 50, 75 kb, or 100 kb, of the gene.

TABLE 4
Natural Harbor ™ sites. Column 1 indicates a retrotransposon that inserts into the
Natural Harbor ™ site. Column 2 indicates the gene at the Natural Harbor™ site. Columns 3
and 4 show exemplary human genome sequence 5’ and 3’ of the insertion site (for example, 250
bp). Columns 5 and 6 list the example gene symbol and corresponding Gene ID.

| | | | | Example | |
|---|---|---|---|---|---|
| Target | Target | | | Gene | Example |
| Site | Gene | 5' flanking sequence | 3' flanking sequence | Symbol | Gene ID |
| R2 | 28S | CCGGTCCCCCCCGC | GTAGCCAAATGCCT | RNA28SN1 | 106632264 |
| | rDNA | CGGGTCCGCCCCCG | CGTCATCTAATTAG | | |
| | | GGGCCGCGGTTCCG | TGACGCGCATGAAT | | |
| | | CGCGGCGCCTCGCC | GGATGAACGAGATT | | |
| | | TCGGCCGGCGCCTA | CCCACTGTCCCTAC | | |
| | | GCAGCCGACTTAGA | CTACTATCCAGCGA | | |
| | | ACTGGTGCGGACCA | AACCACAGCCAAG | | |
| | | GGGGAATCCGACTG | GGAACGGGCTTGGC | | |
| | | TTTAATTAAAACAA | GGAATCAGCGGGG | | |
| | | AGCATCGCGAAGGC | AAAGAAGACCCTGT | | |
| | | CCGCGGCGGGTGTT | TGAGCTTGACTCTA | | |
| | | GACGCGATGTGATT | GTCTGGCACGGTGA | | |
| | | TCTGCCCAGTGCTC | AGAGACATGAGAG | | |
| | | TGAATGTCAAAGTG | GTGTAGAATAAGTG | | |
| | | AAGAAATTCAATGA | GGAGGCCCCCGGCG | | |
| | | AGCGCGGGTAAAC | CCCCCCCGGTGTCC | | |
| | | GGCGGGAGTAACTA | CCGCGAGGGGCCCG | | |
| | | TGACTCTCTTAAG | GGGCGGGGTCCGCC | | |
| | | (SEQ ID NO: 1845) | G (SEQ ID NO: 1856) | | |
| R4 | 28S | GCGGTTCCGCGCGG | CGCATGAATGGATG | RNA28SN1 | 106632264 |
| | rDNA | CGCCTCGCCTCGGC | AACGAGATTCCCAC | | |
| | | CGGCGCCTAGCAGC | TGTCCCTACCTACT | | |
| | | CGACTTAGAACTGG | ATCCAGCGAAACCA | | |
| | | TGCGGACCAGGGG | CAGCCAAGGGAAC | | |
| | | AATCCGACTGTTTA | GGGCTTGGCGGAAT | | |
| | | ATTAAAACAAAGCA | CAGCGGGGAAAGA | | |
| | | TCGCGAAGGCCCGC | AGACCCTGTTGAGC | | |
| | | GGCGGGTGTTGACG | TTGACTCTAGTCTG | | |
| | | CGATGTGATTTCTG | GCACGGTGAAGAG | | |
| | | CCCAGTGCTCTGAA | ACATGAGAGGTGTA | | |
| | | TGTCAAAGTGAAGA | GAATAAGTGGGAG | | |
| | | AATTCAATGAAGCG | GCCCCCGGCGCCCC | | |
| | | CGGGTAAACGGCG | CCCGGTGTCCCCGC | | |
| | | GGAGTAACTATGAC | GAGGGGCCCGGGG | | |
| | | TCTCTTAAGGTAGC | CGGGGTCCGCCGGC | | |
| | | CAAATGCCTCGTCA | CCTGCGGGCCGCCG | | |
| | | TCTAATTAGTGACG | GTGAAATACCACTA | | |
| | | (SEQ ID NO: 1846) | CTC (SEQ ID NO: | | |
| | | | 1857) | | |
| R5 | 28S | TCCCCCCCGCCGGG | CCAAATGCCTCGTC | RNA28SN1 | 106632264 |
| | rDNA | TCCGCCCCCGGGGC | ATCTAATTAGTGAC | | |
| | | CGCGGTTCCGCGCG | GCGCATGAATGGAT | | |
| | | GCGCCTCGCCTCGG | GAACGAGATTCCCA | | |
| | | CCGGCGCCTAGCAG | CTGTCCCTACCTAC | | |
| | | CCGACTTAGAACTG | TATCCAGCGAAACC | | |
| | | GTGCGGACCAGGG | ACAGCCAAGGGAA | | |
| | | GAATCCGACTGTTT | CGGGCTTGGCGGAA | | |
| | | AATTAAAACAAAGC | TCAGCGGGGAAAG | | |
| | | ATCGCGAAGGCCCG | AAGACCCTGTTGAG | | |
| | | CGGCGGGTGTTGAC | CTTGACTCTAGTCT | | |
| | | GCGATGTGATTTCT | GGCACGGTGAAGA | | |
| | | GCCCAGTGCTCTGA | GACATGAGAGGTGT | | |
| | | ATGTCAAAGTGAAG | AGAATAAGTGGGA | | |
| | | AAATTCAATGAAGC | GGCCCCCGGCGCCC | | |
| | | GCGGGTAAACGGC | CCCCGGTGTCCCCG | | |
| | | GGGAGTAACTATGA | CGAGGGGCCCGGG | | |
| | | CTCTCTTAAGGTAG | GCGGGGTCCGCCGG | | |
| | | (SEQ ID NO: 1847) | CCC (SEQ ID NO: | | |
| | | | 1858) | | |
| R9 | 28S | CGGCGCGCTCGCCG | TAGCTGGTTCCCTC | RNA28SN1 | 106632264 |
| | rDNA | GCCGAGGTGGGATC | CGAAGTTTCCCTCA | | |
| | | CCGAGGCCTCTCCA | GGATAGCTGGCGCT | | |
| | | GTCCGCCGAGGGCG | CTCGCAGACCCGAC | | |
| | | CACCACCGGCCCGT | GCACCCCCGCCACG | | |
| | | CTCGCCCGCCGCGC | CAGTTTTATCCGGT | | |
| | | CGGGGAGGTGGAG | AAAGCGAATGATTA | | |
| | | CACGAGCGCACGTG | GAGGTCTTGGGGCC | | |
| | | TTAGGACCCGAAAG | GAAACGATCTCAAC | | |
| | | ATGGTGAACTATGC | CTATTCTCAAACTT | | |
| | | CTGGGCAGGGCGA | TAAATGGGTAAGAA | | |
| | | AGCCAGAGGAAAC | GCCCGGCTCGCTGG | | |
| | | TCTGGTGGAGGTCC | CGTGGAGCCGGGCG | | |
| | | GTAGCGGTCCTGAC | TGGAATGCGAGTGC | | |
| | | GTGCAAATCGGTCG | CTAGTGGGCCACTT | | |
| | | TCCGACCTGGGTAT | TTGGTAAGCAGAAC | | |
| | | AGGGGCGAAAGAC | TGGCGCTGCGGGAT | | |
| | | TAATCGAACCATCT | GAACCGAACGCC | | |
| | | AG (SEQ ID NO: 1848) | (SEQ ID NO: 1859) | | |
| R8 | 18S | GCATTCGTATTGCG | TGAAACTTAAAGGA | RNA18SN1 | 106631781 |
| | rDNA | CCGCTAGAGGTGAA | ATTGACGGAAGGGC | | |
| | | ATTCTTGGACCGGC | ACCACCAGGAGTGG | | |
| | | GCAAGACGGACCA | AGCCTGCGGCTTAA | | |
| | | GAGCGAAAGCATTT | TTTGACTCAACACG | | |
| | | GCCAAGAATGTTTT | GGAAACCTCACCCG | | |
| | | CATTAATCAAGAAC | GCCCGGACACGGAC | | |
| | | GAAAGTCGGAGGTT | AGGATTGACAGATT | | |
| | | CGAAGACGATCAG | GATAGCTCTTTCTC | | |
| | | ATACCGTCGTAGTT | GATTCCGTGGGTGG | | |
| | | CCGACCATAAACGA | TGGTGCATGGCCGT | | |
| | | TGCCGACCGGCGAT | TCTTAGTTGGTGGA | | |
| | | GCGGCGGCGTTATT | GCGATTTGTCTGGT | | |
| | | CCCATGACCCGCCG | TAATTCCGATAACG | | |
| | | GGCAGCTTCCGGGA | AACGAGACTCTGGC | | |
| | | AACCAAAGTCTTTG | ATGCTAACTAGTTA | | |
| | | GGTTCCGGGGGGAG | CGCGACCCCCGAGC | | |
| | | TATGGTTGCAAAGC | GGTCGGCGTCCC | | |
| | | (SEQ ID NO: 1849) | (SEQ ID NO: 1860) | | |
| R4- | tRNA- | | | TRD- | 100189207 |
| 2_SRa | Asp | | | GTC1-1 | |
| LIN25_ | tRNA- | | | TRE- | 100189384 |
| SM | Glu | | | CTC1-1 | |
| R1 | 28S | TAGCAGCCGACTTA | ACCTACTATCCAGC | RNA28SN1 | 106632264 |
| | rDNA | GAACTGGTGCGGAC | GAAACCACAGCCA | | |
| | | CAGGGGAATCCGAC | AGGGAACGGGCTTG | | |
| | | TGTTTAATTAAAAC | GCGGAATCAGCGG | | |
| | | AAAGCATCGCGAA | GGAAAGAAGACCC | | |
| | | GGCCCGCGGCGGGT | TGTTGAGCTTGACT | | |
| | | GTTGACGCGATGTG | CTAGTCTGGCACGG | | |
| | | ATTTCTGCCCAGTG | TGAAGAGACATGA | | |
| | | CTCTGAATGTCAAA | GAGGTGTAGAATAA | | |
| | | GTGAAGAAATTCAA | GTGGGAGGCCCCCG | | |
| | | TGAAGCGCGGGTAA | GCGCCCCCCCGGTG | | |
| | | ACGGCGGGAGTAA | TCCCCGCGAGGGGC | | |
| | | CTATGACTCTCTTA | CCGGGGCGGGGTCC | | |
| | | AGGTAGCCAAATGC | GCCGGCCCTGCGGG | | |
| | | CTCGTCATCTAATT | CCGCCGGTGAAATA | | |
| | | AGTGACGCGCATGA | CCACTACTCTGATC | | |
| | | ATGGATGAACGAG | GTTTTTTCACTGAC | | |
| | | ATTCCCACTGTCCC | CCGGTGAGGCGGG | | |
| | | T (SEQ ID NO: 1850) | GGG (SEQ ID NO: | | |
| | | | 1861) | | |
| R6 | 28S | CCCCCCGCCGGGTC | AAATGCCTCGTCAT | RNA28SN1 | 106632264 |
| | rDNA | CGCCCCCGGGGCCG | CTAATTAGTGACGC | | |
| | | CGGTTCCGCGCGGC | GCATGAATGGATGA | | |
| | | GCCTCGCCTCGGCC | ACGAGATTCCCACT | | |
| | | GGCGCCTAGCAGCC | GTCCCTACCTACTA | | |
| | | GACTTAGAACTGGT | TCCAGCGAAACCAC | | |
| | | GCGGACCAGGGGA | AGCCAAGGGAACG | | |
| | | ATCCGACTGTTTAA | GGCTTGGCGGAATC | | |
| | | TTAAAACAAAGCAT | AGCGGGGAAAGAA | | |
| | | CGCGAAGGCCCGCG | GACCCTGTTGAGCT | | |
| | | GCGGGTGTTGACGC | TGACTCTAGTCTGG | | |
| | | GATGTGATTTCTGC | CACGGTGAAGAGA | | |
| | | CCAGTGCTCTGAAT | CATGAGAGGTGTAG | | |
| | | GTCAAAGTGAAGA | AATAAGTGGGAGG | | |
| | | AATTCAATGAAGCG | CCCCCGGCGCCCCC | | |
| | | CGGGTAAACGGCG | CCGGTGTCCCCGCG | | |
| | | GGAGTAACTATGAC | AGGGGCCCGGGGC | | |
| | | TCTCTTAAGGTAGC | GGGGTCCGCCGGCC | | |
| | | C (SEQ ID NO: 1851) | CTG (SEQ ID NO: | | |
| | | | 1862) | | |
| R7 | 18S | GCGCAAGACGGAC | GGAGCCTGCGGCTT | RNA18SN1 | 106631781 |
| | rDNA | CAGAGCGAAAGCA | AATTTGACTCAACA | | |
| | | TTTGCCAAGAATGT | CGGGAAACCTCACC | | |
| | | TTTCATTAATCAAG | CGGCCCGGACACGG | | |
| | | AACGAAAGTCGGA | ACAGGATTGACAGA | | |
| | | GGTTCGAAGACGAT | TTGATAGCTCTTTCT | | |
| | | CAGATACCGTCGTA | CGATTCCGTGGGTG | | |
| | | GTTCCGACCATAAA | GTGGTGCATGGCCG | | |
| | | CGATGCCGACCGGC | TTCTTAGTTGGTGG | | |
| | | GATGCGGCGGCGTT | AGCGATTTGTCTGG | | |
| | | ATTCCCATGACCCG | TTAATTCCGATAAC | | |
| | | CCGGGCAGCTTCCG | GAACGAGACTCTGG | | |
| | | GGAAACCAAAGTCT | CATGCTAACTAGTT | | |
| | | TTGGGTTCCGGGGG | ACGCGACCCCCGAG | | |
| | | GAGTATGGTTGCAA | CGGTCGGCGTCCCC | | |
| | | AGCTGAAACTTAAA | CAACTTCTTAGAGG | | |
| | | GGAATTGACGGAA | GACAAGTGGCGTTC | | |
| | | GGGCACCACCAGG | AGCCACCCGAG | | |
| | | AGT (SEQ ID NO: | (SEQ ID NO: 1863) | | |
| | | 1852) | | | |
| RT | 28S | GGCCGGGCGCGACC | AACTGGCTTGTGGC | RNA28SN1 | 106632264 |
| | rDNA | CGCTCCGGGGACAG | GGCCAAGCGTTCAT | | |
| | | TGCCAGGTGGGGAG | AGCGACGTCGCTTT | | |
| | | TTTGACTGGGGCGG | TTGATCCTTCGATG | | |
| | | TACACCTGTCAAAC | TCGGCTCTTCCTAT | | |
| | | GGTAACGCAGGTGT | CATTGTGAAGCAGA | | |
| | | CCTAAGGCGAGCTC | ATTCACCAAGCGTT | | |
| | | AGGGAGGACAGAA | GGATTGTTCACCCA | | |
| | | ACCTCCCGTGGAGC | CTAATAGGGAACGT | | |
| | | AGAAGGGCAAAAG | GAGCTGGGTTTAGA | | |
| | | CTCGCTTGATCTTG | CCGTCGTGAGACAG | | |
| | | ATTTTCAGTACGAA | GTTAGTTTTACCCT | | |
| | | TACAGACCGTGAAA | ACTGATGATGTGTT | | |
| | | GCGGGGCCTCACGA | GTTGCCATGGTAAT | | |
| | | TCCTTCTGACCTTTT | CCTGCTCAGTACGA | | |
| | | GGGTTTTAAGCAGG | GAGGAACCGCAGG | | |
| | | AGGTGTCAGAAAA | TTCAGACATTTGGT | | |
| | | GTTACCACAGGGAT | GTATGTGCTTGGC | | |
| | | (SEQ ID NO: 1853) | (SEQ ID NO: 1864) | | |
| Mutsu | 5S | GTCTACGGCCATAC | TGAACGCGCCCGAT | RNA5S1 | 100169751 |
| | rDNA | CACCC (SEQ ID NO: | CTCGTCTGATCTCG | | |
| | | 1854) | GAAGCTAAGCAGG | | |
| | | | GTCGGGCCTGGTTA | | |
| | | | GTACTTGGATGGGA | | |
| | | | GACCGCCTGGGAAT | | |
| | | | ACCGGGTGCTGTAG | | |
| | | | GCTTT (SEQ ID NO: | | |
| | | | 1865) | | |
| Utopia/ | U2 | ATCGCTTCTCGGCC | TCTGTTCTTATCAGT | RNU2-1 | 6066 |
| Keno | snRNA | TTTTGGCTAAGATC | TTAATATCTGATAC | | |
| | | AAGTGTAGTA (SEQ | GTCCTCTATCCGAG | | |
| | | ID NO: 1855) | GACAATATATTAAA | | |
| | | | TGGATTTTTGGAGC | | |
| | | | AGGGAGATGGAAT | | |
| | | | AGGAGCTTGCTCCG | | |
| | | | TCCACTCCACGCAT | | |
| | | | CGACCTGGTATTGC | | |
| | | | AGTACCTCCAGGAA | | |
| | | | CGGTGCACCC (SEQ | | |
| | | | ID NO: 1866) | | |

### Additional Functional Characteristics for Gene Writers™

[0150] A Gene Writer as described herein may, in some instances, be characterized by one or more functional measurements or characteristics. In some embodiments, the DNA binding domain (e.g., target binding domain) has one or more of the functional characteristics described below. In some embodiments, the template binding domain has one or more of the functional characteristics described below. In some embodiments, the template (e.g., template DNA) has one or more of the functional characteristics described below. In some embodiments, the target site altered by the Gene Writer has one or more of the functional characteristics described below following alteration by the Gene Writer.

[0151] Gene Writer Polypeptide

[0152] DNA Binding Domain

[0153] In some embodiments, the DNA binding domain is capable of binding to a target sequence (e.g., a dsDNA target sequence) with greater affinity than a reference DNA binding domain. In some embodiments, the reference DNA binding domain is a DNA binding domain from the Cre recombinase of bacteriophage P1. In some embodiments, the DNA binding domain is capable of binding to a target sequence (e.g., a dsDNA target sequence) with an affinity between 100 pM-10 nM (e.g., between 100 pM-1 nM or 1 nM-10 nM).

[0154] In some embodiments, the affinity of a DNA binding domain for its target sequence (e.g., dsDNA target sequence) is measured in vitro, e.g., by thermophoresis, e.g., as described in Asmari et al. Methods 146:107-119 (2018) (incorporated by reference herein in its entirety).

[0155] In embodiments, the DNA binding domain is capable of binding to its target sequence (e.g., dsDNA target sequence), e.g, with an affinity between 100 pM-10 nM (e.g., between 100 pM-1 nM or 1 nM-10 nM) in the presence of a molar excess of scrambled sequence competitor dsDNA, e.g., of about 100-fold molar excess.

[0156] In some embodiments, the DNA binding domain is found associated with its target sequence (e.g., dsDNA target sequence) more frequently than any other sequence in the genome of a target cell, e.g., human target cell, e.g., as measured by ChIP-seq (e.g., in HEK293T cells), e.g., as described in He and Pu (2010) Curr. Protoc Mol Biol Chapter 21 (incorporated herein by reference in its entirety). In some embodiments, the DNA binding domain is found associated with its target sequence (e.g., dsDNA target sequence) at least about 5-fold or 10-fold, more frequently than any other sequence in the genome of a target cell, e.g., as measured by ChIP-seq (e.g., in HEK293T cells), e.g., as described in He and Pu (2010), supra.

[0157] Template Binding Domain

[0158] In some embodiments, the template binding domain is capable of binding to a template DNA with greater affinity than a reference DNA binding domain. In some embodiments, the reference DNA binding domain is a DNA binding domain from the Cre recombinase of bacteriophage P1. In some embodiments, the template binding domain is capable of binding to a template DNA with an affinity between 100 pM-10 nM (e.g., between 100 pM-1 nM or 1 nM-10 nM). In some embodiments, the affinity of a DNA binding domain for its template DNA is measured in vitro, e.g., by thermophoresis, e.g., as described in Asmari et al. Methods 146:107-119 (2018) (incorporated by reference herein in its entirety). In some embodiments, the affinity of a DNA binding domain for its template DNA is measured in cells (e.g., by FRET or ChIP-Seq).

[0159] In some embodiments, the DNA binding domain is associated with the template DNA in vitro with at least 50% template DNA bound in the presence of 10 nM competitor DNA, e.g., as described in Yant et al. Mol Cell Biol 24(20):9239-9247 (2004) (incorporated by reference herein in its entirety). In some embodiments, the DNA binding domain is associated with the template DNA in cells (e.g., in HEK293T cells) at a frequency at least about 5-fold or 10-fold higher than with a scrambled DNA. In some embodiments, the frequency of association between the DNA binding domain and the template DNA or scrambled DNA is measured by ChIP-seq, e.g., as described in He and Pu (2010), supra.

[0160] Target Site

[0161] In some embodiments, after Gene Writing, the target site surrounding the integrated sequence contains a limited number of insertions or deletions, for example, in less than about 50% or 10% of integration events, e.g., as determined by long-read amplicon sequencing of the target site, e.g., as described in Karst et al. (2020) bioRxiv doi.org/10.1101/645903 (incorporated by reference herein in its entirety). In some embodiments, the target site does not show multiple insertion events, e.g., head-to-tail or head-to-head duplications, e.g., as determined by long-read amplicon sequencing of the target site, e.g., as described in Karst et al. (2020), supra. In some embodiments, the target site contains an integrated sequence corresponding to the template DNA. In some embodiments, the target site contains a completely integrated template molecule. In some embodiments, the target site contains components of the vector DNA, e.g., AAV ITRs. In some embodiments, e.g., when a template DNA is first excised from a viral vector by a first recombination event prior to integration, the target site does not contain insertions resulting from non-template DNA, e.g., endogenous or vector DNA, e.g., AAV ITRs, in more than about 1% or 10% of events, e.g., as determined by long-read amplicon sequencing of the target site, e.g., as described in Karst et al. (2020), supra. In some embodiments, the target site contains the integrated sequence corresponding to the template DNA.

[0162] In some embodiments, a Gene Writer described herein is capable of site-specific editing of target DNA, e.g., insertion of template DNA into a target DNA. In some embodiments, a site-specific Gene Writer is capable of generating an edit, e.g., an insertion, that is present at the target site with a higher frequency than any other site in the genome. In some embodiments, a site-specific Gene Writer is capable of generating an edit, e.g., an insertion in a target site at a frequency of at least 2, 3, 4, 5, 10, 50, 100, or 1000-fold that of the frequency at all other sites in the human genome. In some embodiments, the location of integration sites is determined by unidirectional sequencing. The incorporation of unique molecular identifiers (UMI) in the adapters or primers used in library preparation allows the quantification of discrete insertion events, which can be compared between on-target insertions and all other insertions to determine the preference for the defined target site.

[0163] In some embodiments, a Gene Writing system is used to edit a target DNA sequence that is present at a single location in the human genome. In some embodiments, a Gene Writing system is used to edit a target DNA sequence that is present at a single location in the human genome on a single homologous chromosome, e.g., is haplotype-specific. In some embodiments, a Gene Writing system is used to edit a target DNA sequence that is present at a single location in the human genome on two homologous chromosomes. In some embodiments, a Gene Writing system is used to edit a target DNA sequence that is present in multiple locations in the genome, e.g., at least 2, 3, 4, 5, 10, 20, 50, 100, 200, 500, 1000, 5000, 10000, 100000, 200000, 500000, 1000000 (e.g., Alu elements) locations in the genome.

[0164] In some embodiments, a Gene Writer system is able to edit a genome without introducing undesirable mutations. In some embodiments, a Gene Writer system is able to edit a genome by inserting a template, e.g., template DNA, into the genome. In some embodiments, the resulting modification in the genome contains minimal mutations relative to the template DNA sequence. In some embodiments, the average error rate of genomic insertions relative to the template DNA is less than 10⁻⁴, 10⁻⁵, or 10⁻⁶ mutations per nucleotide. In some embodiments, the number of mutations relative to a template DNA that is introduced into a target cell averages less than 1, 2, 3, 4, 5, 10, 20, 30, 40, 50, 60, 70, 80, 90, or 100 nucleotides per genome. In some embodiments, the error rate of insertions in a target genome is determined by long-read amplicon sequencing across known target sites, e.g., as described in Karst et al. (2020), supra, and comparing to the template DNA sequence. In some embodiments, errors enumerated by this method include nucleotide substitutions relative to the template sequence. In some embodiments, errors enumerated by this method include nucleotide deletions relative to the template sequence. In some embodiments, errors enumerated by this method include nucleotide insertions relative to the template sequence. In some embodiments, errors enumerated by this method include a combination of one or more of nucleotide substitutions, deletions, or insertions relative to the template sequence.

[0165] Efficiency of integration events can be used as a measure of editing of target sites or target cells by a Gene Writer system. In some embodiments, a Gene Writer system described herein is capable of integrating a heterologous object sequence in a fraction of target sites or target cells. In some embodiments, a Gene Writer system is capable of editing at least 1%, 2%, 5%, 10%, 20%, 30%, 40%, 50%, 60%, 70%, 80%, 90%, 95%, 96%, 97%, 98%, 99%, 99.5%, 99.9% or 100% of target loci as measured by the detection of the edit when amplifying across the target and analyzing with long-read amplicon sequencing, e.g., as described in Karst et al. (2020). In some embodiments, a Gene Writer system is capable of editing cells at an average copy number of at least 0.1, e.g., at least 0.1, 0.5, 1, 2, 3, 4, 5, 10, or 100 copies per genome as normalized to a reference gene, e.g., RPP30, across a population of cells, e.g., as determined by ddPCR with transgene-specific primer-probe sets, e.g., as according to the methods in Lin et al. Hum Gene Ther Methods 27(5):197-208 (2016).

[0166] In some embodiments, the copy number per cell is analyzed by single-cell ddPCR (sc-ddPCR), e.g., as according to the methods of Igarashi et al. Mol Ther Methods Clin Dev 6:8-16 (2017), incorporated herein by reference in its entirety. In some embodiments, at least 1%, e.g., at least 1%, 2%, 5%, 10%, 20%, 30%, 40%, 50%, 60%, 70%, 80%, 90%, 95%, 96%, 97%, 98%, 99%, 99.5%, 99.9% or 100%, of target cells are positive for integration as assessed by sc-ddPCR using transgene-specific primer-probe sets. In some embodiments, the average copy number is at least 0.1, e.g., at least 0.1, 0.5, 1, 2, 3, 4, 5, 10, or 100 copies per cell as measured by sc-ddPCR using transgene-specific primer-probe sets.

[0167] Additional Gene Writer Characteristics

[0168] In some embodiments, the Gene Writer system may result in complete writing without requiring endogenous host factors. In some embodiments, the system may result in complete writing without the need for DNA repair. In some embodiments, the system may result in complete writing without eliciting a DNA damage response.

[0169] In some embodiments, the system does not require DNA repair by the NHEJ pathway, homologous recombination repair pathway, base excision repair pathway, or any combination thereof. Participation by a DNA repair pathway can be assayed, for example, via the application of DNA repair pathway inhibitors or DNA repair pathway deficient cell lines. For example, when applying DNA repair pathway inhibitors, PrestoBlue cell viability assay can be performed first to determine the toxicity of the inhibitors and whether any normalization should be applied. SCR7 is an inhibitor for NHEJ, which can be applied at a series of dilutions during Gene Writer™ delivery. PARP protein is a nuclear enzyme that binds as homodimers to both single- and double-strand breaks. Thus, its inhibitors can be used in the test of relevant DNA repair pathways, including homologous recombination repair pathway and base excision repair pathway. The experiment procedure is the same with that of SCR7. Cell lines with deficient core proteins of nucleotide excision repair (NER) pathway can be used to test the effect of NER on Gene Writing™. After the delivery of the Gene Writer™ system into the cell, ddPCR can used to evaluate the insertion of a heterologous object sequence in the context of inhibition of DNA repair pathways. Sequencing analysis can also be performed to evaluate whether certain DNA repair pathways play a role. In some embodiments, Gene Writing™ into the genome is not decreased by the knockdown of a DNA repair pathway described herein. In some embodiments, Gene Writing™ into the genome is not decreased by more than 50% by the knockdown of the DNA repair pathway.

### Evolved Variants of Gene Writers

[0170] In some embodiments, the invention provides evolved variants of Gene Writers. Evolved variants can, in some embodiments, be produced by mutagenizing a reference Gene Writer, or one of the fragments or domains comprised therein. In some embodiments, one or more of the domains (e.g., the catalytic or DNA binding domain (e.g., target binding domain or template binding domain), including, for example, sequence-guided DNA binding elements) is evolved, One or more of such evolved variant domains can, in some embodiments, be evolved alone or together with other domains. An evolved variant domain or domains may, in some embodiments, be combined with unevolved cognate component(s) or evolved variants of the cognate component(s). e.g., which may have been evolved in either a parallel or serial manner.

[0171] In some embodiments, the process of mutagenizing a reference Gene Writer, or fragment or domain thereof, comprises mutagenizing the reference Gene Writer or fragment or domain thereof. In embodiments, the mutagenesis comprises a continuous evolution method (e.g., PACE) or non-continuous evolution method (e.g., PANCE). e.g., as described herein. In some embodiments, the evolved Gene Writer, or a fragment or domain thereof (e.g., a DNA binding domain, e.g., a target binding domain or a template binding domain), comprises one or more amino acid variations introduced into its amino acid sequence relative to the amino acid sequence of the reference Gene Writer, or fragment or domain thereof. In embodiments, amino acid sequence variations may include one or more mutated residues (e.g., conservative substitutions, non-conservative substitutions, or a combination thereof) within the amino acid sequence of a reference Gene Writer, e.g., as a result of a change in the nucleotide sequence encoding the gene writer that results in, e.g., a change in the codon at any particular position in the coding sequence, the deletion of one or more amino acids (e.g., a truncated protein), the insertion of one or more amino acids, or any combination of the foregoing. The evolved variant Gene Writer may include variants in one or more components or domains of the Gene Writer (e.g., variants introduced into a catalytic domain, DNA binding domain, or combinations thereof).

[0172] In some aspects, the invention provides Gene Writers, systems, kits, and methods using or comprising an evolved variant of a Gene Writer, e.g., employs an evolved variant of a Gene Writer or a Gene Writer produced or producible by PACE or PANCE. In embodiments, the unevolved reference Gene Writer is a Gene Writer as disclosed herein.

[0173] The term “phage-assisted continuous evolution (PACE),” as used herein, generally refers to continuous evolution that employs phage as viral vectors. Examples of PACE technology have been described, for example, in International PCT Application No. PCT/US 2009/056194, filed Sep. 8, 2009, published as WO 2010/028347 on Mar. 11, 2010; International PCT Application, PCT/US2011/066747, filed Dec. 22, 2011, published as WO 2012/088381 on Jun. 28, 2012; U.S. Pat. No. 9,023,594, issued May 5, 2015; U.S. Pat. No. 9,771,574, issued Sep. 26, 2017; U.S. Pat. No. 9,394,537, issued Jul. 19, 2016; international PCT Application, PCT/US2015/012022, filed Jan. 20, 2015, published as WO 2015/134121 on Sep. 11, 2015; U.S. Pat. No. 10,179,911, issued Jan. 15, 2019; and International PCT Application, PCT/US2016/027795, filed Apr. 15, 2016, published as WO 2016/168631 on Oct. 20, 2016, the entire contents of each of which are incorporated herein by reference.

[0174] The term “phage-assisted non-continuous evolution (PANC II)” as used herein, generally refers to non-continuous evolution that employs phage as viral vectors. Examples of PANCE technology have been described, for example, in Suzuki T. et al, Crystal structures reveal an elusive functional domain of pyrrolysyl-tRNA synthetase, Nat Chem Biol. 13(12): 1261-1266 (2017), incorporated herein by reference in its entirety, Briefly, PANCE is a technique for rapid in vivo directed evolution using serial flask transfers of evolving selection phage (SP), which contain a gene of interest to be evolved, across fresh host cells (e.g., E. coli cells). Genes inside the host cell may be held constant while genes contained in the SP continuously evolve. Following phage growth, an aliquot of infected cells may be used to transfect a subsequent flask containing host E. coli. This process can be repeated and/or continued until the desired phenotype is evolved, e.g., for as many transfers as desired.

[0175] Methods of applying PACE and PANCE to Gene Writers may be readily appreciated by the skilled artisan by reference to, inter alia, the foregoing references. Additional exemplary methods for directing continuous evolution of genome-modifying proteins or systems, e.g., in a population of host cells e.g., using phage particles, can be applied to generate evolved variants of Gene Writers. or fragments or subdomains thereof. Non-limiting examples of such methods are described in International PCT Application, PCT/US2009/056194, filed Sep. 8, 2009, published as WO 2010/028347 on Mar. 11, 2010; International PCT Application, PCT/US2011/066747, filed Dec. 22, 2011, published as WO 2012/088381 on Jun. 28, 2012; U.S. Pat. No. 9,023,594, issued May 5, 2015; U.S. Pat. No. 9,771,574, issued Sep. 26, 2017: U.S. Pat. No. 9,394,537, issued Jul. 19, 2016: International PCT Application, PCT/US2015/012022, filed Jan. 20, 2015, published as WO 2015/134121 on Sep. 11, 2015; U.S. Pat. No. 10,179,911, issued Jan. 15, 2019; International Application No. PCT/US2019/37216, filed Jun. 14, 2019, International Patent Publication WO 2019/023680, published Jan. 31, 2019, International PCT Application, PCT/US2016/027795, filed Apr. 15, 2016, published as WO 2016/168631 on Oct. 20, 2016, and International Patent Publication No. PCT/US2019/47996, filed Aug. 23, 2019, each of which is incorporated herein by reference in its entirety.

[0176] In some non-limiting illustrative embodiments, a method of evolution of a evolved variant Gene Writer, of a fragment or domain thereof, comprises: (a) contacting a population of host cells with a population of viral vectors comprising the gene of interest (the starting Gene Writer or fragment or domain thereof), wherein: (1) the host cell is amenable to infection by the viral vector; (2) the host cell expresses viral genes required for the generation of viral particles; (3) the expression of at least one viral gene required for the production of an infectious viral particle is dependent on a function of the gene of interest; and/or (4) the viral vector allows for expression of the protein in the host cell, and can be replicated and packaged into a viral particle by the host cell. In some embodiments, the method comprises (b) contacting the host cells with a Mutagen, using host cells with mutations that elevate mutation rate (e.g., either by carrying a mutation plasmid or some genome modification—e.g., proofing-impaired DNA polymerase, SOS genes, such as UmuC, UmuD′, and/or RecA, which mutations, if plasmid-bound, may be under control of an inducible promoter), or a combination thereof. In some embodiments, the method comprises (c) incubating the population of host cells under conditions allowing for viral replication and the production of viral particles, wherein host cells are removed from the host cell population, and fresh, uninfected host cells are introduced into the population of host cells, thus replenishing the population of host cells and creating a flow of host cells. In some embodiments, the cells are incubated under conditions allowing for the gene of interest to acquire a mutation. In some embodiments, the method further comprises (dl) isolating a mutated version of the viral vector, encoding an evolved gene product (e.g., an evolved variant Gene Writer, or fragment or domain thereof), from the population of host cells.

[0177] The skilled artisan will appreciate a variety of features employable within the above-described framework. For example, in some embodiments, the viral vector or the phage is a filamentous phage, for example, an M13 phage, e.g., an M13 selection phage. In certain embodiments, the gene required for the production of infectious viral particles is the M13 gene III (gIII). In embodiments, the phage may lack a functional gIII but otherwise comprise gI, gII, gIV, gV, gVI, gVII, gVIII, gIX, and a gX. In some embodiments, the generation of infectious VSV particles involves the envelope protein VSV-G. Various embodiments can use different retroviral vectors, for example, Murine Leukemia Virus vectors, or Lentiviral vectors. In embodiments, the retroviral vectors can efficiently be packaged with VSV-G envelope protein, e.g., as a substitute for the native envelope protein of the virus.

[0178] In some embodiments, host cells are incubated according to a suitable number of viral life cycles, e.g., at least 10, at least 20, at least 30, at least 40, at least 50, at least 100, at least 200, at least 300, at least 400, at least, 500, at least 600, at least 700, at least 800, at least 900, at least 1000, at least 1250, at least 1500, at least 1750, at least 2000, at least 2500 at least 3000, at least 4000, at least 5000, at least 7500, at least 10000, or more consecutive viral life cycles, which in on illustrative and non-limiting examples of M13 phage is 10-20 minutes per virus life cycle. Similarly, conditions can be modulated to adjust the time a host cell remains in a population of host cells, e.g., about 10, about 11, about 12, about 13, about 14, about 15, about 16, about 17, about 18, about 19, about 20, about 21, about 22, about 23, about 24, about 25, about 30, about 35, about 40, about 45, about 50, about 55, about 60, about 70, about 80, about 90, about 100, about 120, about 150, or about 180 minutes. Host cell populations can be controlled in part by density of the host cells, or, in some embodiments, the host cell density in an inflow, e.g., 10³ cells/ml, about 10⁴ cells/ml, about 10⁵ cells/ml, about 5-10⁵ cells/ml, about 10⁶ cells/ml, about 5-10⁶ cells/ml, about 10⁷ cells/ml about 5-10⁷ cells/ml about 10⁸ cells/ml, about 5-10⁸ cells/ml, about 10⁹ cells/ml about 5·10⁹ cells/ml about 10¹⁰ cells/ml, or about 5·10¹⁰ cells/ml.

### Nucleic Acids

### Promoters

[0179] In some embodiments, one or more promoter or enhancer elements are operably linked to a nucleic acid encoding a Gene Writer polypeptide or a template nucleic acid, e.g., that controls expression of the heterologous object sequence. In certain embodiments, the one or more promoter or enhancer elements comprise cell-type or tissue specific elements. In some embodiments, the promoter or enhancer is the same or derived from the promoter or enhancer that naturally controls expression of the heterologous object sequence. For example, the ornithine transcarbomylase promoter and enhancer may be used to control expression of the ornithine transcarbomylase gene in a system or method provided by the invention for correcting ornithine transcarbomylase deficiencies. In some embodiments, the promoter is a promoter of Table 33 or a functional fragment or variant thereof.

[0180] Exemplary tissue specific promoters that are commercially available can be found, for example, at a uniform resource locator (e.g., invivogen.com/tissue-specific-promoters). In some embodiments, a promoter is a native promoter or a minimal promoter, e.g., which consists of a single fragment from the 5′ region of a given gene. In some embodiments, a native promoter comprises a core promoter and its natural 5′ UTR. In some embodiments, the 5° UTR comprises an intron. In other embodiments, these include composite promoters, which combine promoter elements of different origins or were generated by assembling a distal enhancer with a minimal promoter of the same origin. In some embodiments, a tissue-specific expression-control sequence(s) comprises one or more of the sequences in Table 2 or Table 3 of PCT Publication No. WO2020014209 (incorporated herein by reference in its entirety).

[0181] Exemplary cell or tissue specific promoters are provided in the tables, below, and exemplary nucleic acid sequences encoding them are known in the art and can be readily accessed using a variety of resources, such as the NCBI database, including RefSeq, as well as the Eukaryotic Promoter Database (http://epd.epfl.ch//index.php).

TABLE 5
Exemplary cell or tissue-specific promoters

| Promoter | Target cells |
|---|---|
| B29 Promoter | B cells |
| CD14 Promoter | Monocytic Cells |
| CD43 Promoter | Leukocytes and platelets |
| CD45 Promoter | Hematopoeitic cells |
| CD68 promoter | macrophages |
| Desmin promoter | muscle cells |
| Elastase-1 | pancreatic |
| promoter | acinar cells |
| Endoglin promoter | endothelial cells |
| fibronectin | differentiating cells, |
| promoter | healing tissue |
| Flt-1 promoter | endothelial cells |
| GFAP promoter | Astrocytes |
| GPIIB promoter | megakaryocytes |
| ICAM-2 Promoter | Endothelial cells |
| INF-Beta promoter | Hematopoeitic cells |
| Mb promoter | muscle cells |
| Nphs 1 promoter | podocytes |
| OG-2 promoter | Osteoblasts, Odonblasts |
| SP-B promoter | Lung |
| Syn1 promoter | Neurons |
| WASP promoter | Hematopoeitic cells |
| SV40/bAlb | Liver |
| promoter | |
| SV40/bAlb | Liver |
| promoter | |
| SV40/Cd3 | Leukocytes and platelets |
| promoter | |
| SV40/CD45 | hematopoeitic cells |
| promoter | |
| NSE/RU5′ | Mature Neurons |
| promoter | |

TABLE 6
Additional exemplary cell or tissue-specific promoters

| Promoter | Gene Description | Gene Specificity |
|---|---|---|
| APOA2 | Apolipoprotein A-II | Hepatocytes (from hepatocyte |
| | | progenitors) |
| SERPINA | Serpin peptidase inhibitor, clade A | Hepatocytes |
| 1 (hAAT) | (alpha-1 | (from definitive endoderm |
| | antiproteinase, antitrypsin), member 1 | stage) |
| | (also named alpha 1 anti-tryps in) | |
| CYP3A | Cytochrome P450, family 3, | Mature Hepatocytes |
| | subfamily A, polypeptide | |
| MIR122 | MicroRNA 122 | Hepatocytes |
| | | (from early stage embryonic |
| | | liver cells) |
| | | and endoderm |

Pancreatic specific promoters

| | | |
|---|---|---|
| INS | Insulin | Pancreatic beta cells |
| | | (from definitive endoderm stage) |
| IRS2 | Insulin receptor substrate 2 | Pancreatic beta cells |
| Pdx1 | Pancreatic and duodenal | Pancreas |
| | homeobox 1 | (from definitive endoderm stage) |
| A1x3 | Aristaless-like homeobox 3 | Pancreatic beta cells |
| | | (from definitive endoderm stage) |
| Ppy | Pancreatic polypeptide | PP pancreatic cells |
| | | (gamma cells) |

Cardiac specific promoters

| | | |
|---|---|---|
| Myh6 | Myosin, heavy chain 6, cardiac | Late differentiation marker of cardiac |
| (aMHC) | muscle, alpha | muscle cells (atrial specificity) |
| MYL2 | Myosin, light chain 2, regulatory, | Late differentiation marker of cardiac |
| (MLC-2v) | cardiac, slow | muscle cells (ventricular specificity) |
| ITNNl3 | Troponin I type 3 (cardiac) | Cardiomyocytes |
| (cTnl) | | (from immature state) |
| ITNNl3 | Troponin I type 3 (cardiac) | Cardiomyocytes |
| (cTnl) | | (from immature state) |
| NPPA | Natriuretic peptide precursor A (also | Atrial specificity in adult cells |
| (ANF) | named Atrial Natriuretic Factor) | |
| Slc8a1 | Solute carrier family 8 | Cardiomyocytes from early |
| (Ncx1) | (sodium/calcium exchanger), member | developmental stages |
| | 1 | |

CNS specific promoters

| | | |
|---|---|---|
| SYN1 | Synapsin I | Neurons |
| (hSyn) | | |
| GFAP | Glial fibrillary acidic protein | Astrocytes |
| INA | Internexin neuronal intermediate | Neuroprogenitors |
| | filament protein, alpha (a-internexin) | |
| NES | Nestin | Neuroprogenitors and ectoderm |
| MOBP | Myelin-associated oligodendrocyte | Oligodendrocytes |
| | basic protein | |
| MBP | Myelin basic protein | Oligodendrocytes |
| TH | Tyrosine hydroxylase | Dopaminergic neurons |
| FOXA2 | Forkhead box A2 | Dopaminergic neurons (also used as a |
| (HNF3 | | marker of endoderm) |
| beta) | | |

Skin specific promoters

| | | |
|---|---|---|
| FLG | Filaggrin | Keratinocytes from granular layer |
| K14 | Keratin 14 | Keratinocytes from granular |
| | | and basal layers |
| TGM3 | Transglutaminase 3 | Keratinocytes from granular layer |

Immune cell specific promoters

| | | |
|---|---|---|
| ITGAM | Integrin, alpha M (complement | Monocytes, macrophages, granulocytes, |
| (CD11B) | component 3 receptor 3 subunit) | natural killer cells |

Urogential cell specific promoters

| | | |
|---|---|---|
| Pbsn | Probasin | Prostatic epithelium |
| Upk2 | Uroplakin 2 | Bladder |
| Sbp | Spermine binding protein | Prostate |
| Fer114 | Fer-1-like 4 | Bladder |

Endothelial cell specific promoters

| | | |
|---|---|---|
| ENG | Endoglin | Endothelial cells |

Pluripotent and embryonic cell specific promoters

| | | |
|---|---|---|
| Oct4 | POU class 5 homeobox 1 | Pluripotent cells |
| (POU5F1) | | (germ cells, ES cells, iPS cells) |
| NANOG | Nanog homeobox | Pluripotent cells |
| | | (ES cells, iPS cells) |
| Synthetic | Synthetic promoter based on a Oct-4 | Pluripotent cells (ES cells, iPS cells) |
| Oct4 | core enhancer element | |
| T | Brachyury | Mesoderm |
| brachyury | | |
| NES | Nestin | Neuroprogenitors and Ectoderm |
| SOX17 | SRY (sex determining region Y)-box | Endoderm |
| | 17 | |
| FOXA2 | Forkhead box A2 | Endoderm (also used as a marker of |
| (HNFJ | | dopaminergic neurons) |
| beta) | | |
| MIR122 | MicroRNA 122 | Endoderm and hepatocytes |
| | | (from early stage embryonic liver cells~ |

[0182] Depending on the host/vector system utilized, any of a number of suitable transcription and translation control elements, including constitutive and inducible promoters, transcription enhancer elements, transcription terminators, etc. may be used in the expression vector (see e.g., Bitter et al. (1987) Methods in Enzymology, 153:516-544; incorporated herein by reference in its entirety).

[0183] In some embodiments, a nucleic acid encoding a Gene Writer or template nucleic acid is operably linked to a control element. e.g., a transcriptional control element, such as a promoter. The transcriptional control element may, in some embodiment, be functional in either a eukaryotic cell, e.g., a mammalian cell; or a prokaryotic cell (e.g., bacterial or archaeal cell). In some embodiments, a nucleotide sequence encoding a polypeptide is operably linked to multiple control elements, e.g., that allow expression of the nucleotide sequence encoding the polypeptide in both prokaryotic and eukaryotic cells.

[0184] For illustration purposes, examples of spatially restricted promoters include, but are not limited to, neuron-specific promoters, adipocyte-specific promoters, cardiomyocyte-specific promoters, smooth muscle-specific promoters, photoreceptor-specific promoters, etc. Neuron-specific spatially restricted promoters include, but are not limited to, a neuron-specific enolase (NSE) promoter (see, e.g., EMBL HSENO2, X51956); an aromatic amino acid decarboxylase (AADC) promoter, a neurofilament promoter (see, e.g., GenBank HUMNFL, L04147); a synapsin promoter (see, e.g., GenBank H UMSYNIB, M55301); a thy-1 promoter (see, e.g., Chen et al. (1987) Cell 51:7-19; and Llewellyn, et al. (2010) Nat. Med. 16(10):1161-1166); a serotonin receptor promoter (see, e.g., GenBank S62283); a tyrosine hydroxylase promoter (TIH) (see, e.g., Oh et al. (2009) Gene Ther 16:437; Sasaoka et al. (1992) Mol. Brain Res. 16:274; Boundy et al. (1998) J. Neurosci. 18:9989; and Kaneda et al. (1991) Neuron 6:583-594); a GnR H promoter (see, e.g., Radovick et al. (1991) Proc. Natl. Acad. Sci. USA 88:3402-3406); an L7 promoter (see, e.g., Oberdick et al. (1990) Science 248:223-226); a DNMT promoter (see, e.g., Bartge et al. (1988) Proc. Natl. Acad. Sci. USA 85:3648-3652); an enkephalin promoter (see, e.g., Comb et al. (1988) EMBO J. 17:3793-3805); a myelin basic protein (MBP) promoter, a Ca2+-calmodulin-dependent protein kinase II-alpha (CamKIIa) promoter (see, e.g., Mayford et al. (1996) Proc. Nati. Acad. Sci. USA 93:13250; and Casanova et al. (2001) Genesis 31:37); a CMV enhancer/platelet-derived growth factor-β promoter (see. e.g., Liu et al. (2004) Gene Therapy 11:52-60); and the like.

[0185] Adipocyte-specific spatially restricted promoters include, but are not limited to, the aP2 gene promoter/enhancer, e.g., a region from −5.4 kb to +21 bp of a human aP2 gene (see, e.g., Tozzo et al. (1997) Endocrinol. 138:1604; Ross et al. (1990) Proc. Natl. Acad. Sci. USA 87:9590; and Pavjani et al. (2005) Nat. Med. 11:797); a glucose transporter-4 (GLUT4) promoter (see, e.g., Knight et al. (2003) Proc. Natl. Acad. Sci. USA 100:14725); a fatty acid translocase (FAT/CD36) promoter (see, e.g., Kuriki et al. (2002) Biol. Pharm. Bull. 25:1476; and Sato et al. (2002) J. Biol. Chem. 277:15703); a stearoyl-CoA desaturase-1 (SCD1) promoter (Tabor et al. (1999) J. Biol. Chem. 274:20603); a leptin promoter (see. e.g., Mason et al. (1998) Endocrinol. 139:1013; and Chen et al. (1999) Biochem. Biophys. Res. Comm. 262:187); an adiponectin promoter (see, e.g., Kita et al. (2005) Biochem. Biophys. Res. Comm. 331:484; and Chakrabarti (2010) Endocrinol. 151:2408); an adipsin promoter (see, e.g., Platt et al. (1989) Proc. Natl. Acad. Sci. USA 86:7490); a resistin promoter (see, e.g., Seo et al. (2003) Molec. Endocrinol. 17:1522); and the like.

[0186] Cardiomyocyte-specific spatially restricted promoters include, but are not limited to, control sequences derived from the following genes: myosin light chain-2, α-myosin heavy chain, AE3, cardiac troponin C, cardiac actin, and the like. Franz et al. (1997) Cardiovasc. Res. 35:560-566; Robbins et al. (1995) Ann. N.Y. Acad. Sci. 752:492-505; Linn et al. (1995) Circ. Res. 76:584-591: Parmacek et al. (1994) Mol. Cell. Biol. 14:1870-1885; Hunter et al. (1993) Hypertension 22:608-617; and Sartorelli et al. (1992) Proc. Natl. Acad. Sci. USA 89:4047-4051.

[0187] Smooth muscle-specific spatially restricted promoters include, but are not limited to, an SM22α promoter (see, e.g., Akyürek et al. (2000) Mol. Med. 6:983; and U.S. Pat. No. 7,169,874); a smoothelin promoter (see, e.g., WO 2001/018048); an α-smooth muscle actin promoter; and the like. For example, a 0.4 kb region of the SM22α promoter, within which lie two CArG elements, has been shown to mediate vascular smooth muscle cell-specific expression (see. e.g., Kim, et al. (1997) Mol. Cell. Biol. 17, 2266-2278; Li, et al., (1996) J. Cell Biol. 132, 849-859; and Moessler, et al. (1996) Development 122, 2415-2425).

[0188] Photoreceptor-specific spatially restricted promoters include, but are not limited to, a rhodopsin promoter; a rhodopsin kinase promoter (Young et al. (2003) Ophthalmol. Vis. Sci. 44:4076); a beta phosphodiesterase gene promoter (Nicoud et al. (2007) J. Gene Med. 9:1015); a retinitis pigmentosa gene promoter (Nicoud et al. (2007) supra); an interphotoreceptor retinoid-binding protein (IRBP) gene enhancer (Nicoud et al. (2007) supra); an IRBP gene promoter (Yokoyama et al. (1992) Exp Eye Res. 55:225); and the like.

[0189] Nonlimiting Exemplary Cell-Specific Promoters

[0190] Cell-specific promoters known in the art may be used to direct expression of a Gene Writer protein. e.g., as described herein. Nonlimiting exemplary mammalian cell-specific promoters have been characterized and used in mice expressing Cre recombinase in a cell-specific manner. Certain nonlimiting exemplary mammalian cell-specific promoters are listed in Table 1 of U.S. Pat. No. 9,845,481, incorporated herein by reference.

[0191] In some embodiments, the cell-specific promoter is a promoter that is active in plants. Many exemplary cell-specific plant promoters are known in the art. See, e.g., U.S. Pat. Nos. 5,097,025; 5,783,393; 5,880,330; 5,981,727; 7,557,264; 6,291,666; 7,132,526; and 7,323,622; and U.S. Publication Nos. 2010/0269226; 2007/0180580; 2005/0034192; and 2005/0086712, which are incorporated by reference herein in their entireties for any purpose.

[0192] In some embodiments, a vector as described herein comprises an expression cassette. The term “expression cassette”, as used herein, refers to a nucleic acid construct comprising nucleic acid elements sufficient for the expression of the nucleic acid molecule of the instant invention. Typically, an expression cassette comprises the nucleic acid molecule of the instant invention operatively linked to a promoter sequence. The term “operatively linked” refers to the association of two or more nucleic acid fragments on a single nucleic acid fragment so that the function of one is affected by the other. For example, a promoter is operatively linked with a coding sequence when it is capable of affecting the expression of that coding sequence (e.g., the coding sequence is under the transcriptional control of the promoter). Encoding sequences can be operatively linked to regulatory sequences in sense or antisense orientation. In certain embodiments, the promoter is a heterologous promoter. The term “heterologous promoter”, as used herein, refers to a promoter that is not found to be operatively linked to a given encoding sequence in nature. In certain embodiments, an expression cassette may comprise additional elements, for example, an intron, an enhancer, a polyadenylation site, a woodchuck response element (WRE), and/or other elements known to affect expression levels of the encoding sequence. A “promoter” typically controls the expression of a coding sequence or functional RNA. In certain embodiments, a promoter sequence comprises proximal and more distal upstream elements and can further comprise an enhancer element. An “enhancer” can typically stimulate promoter activity and may be an innate element of the promoter or a heterologous element inserted to enhance the level or tissue-specificity of a promoter. In certain embodiments, the promoter is derived in its entirety from a native gene. In certain embodiments, the promoter is composed of different elements derived from different naturally occurring promoters. In certain embodiments, the promoter comprises a synthetic nucleotide sequence. It will be understood by those skilled in the art that different promoters will direct the expression of a gene in different tissues or cell types, or at different stages of development, or in response to different environmental conditions or to the presence or the absence of a drug or transcriptional co-factor. Ubiquitous, cell-type-specific, tissue-specific, developmental stage-specific, and conditional promoters, for example, drug-responsive promoters (e.g., tetracycline-responsive promoters) are well known to those of skill in the art. Examples of promoter include, but are not limited to, the phosphoglycerate kinase (PKG) promoter, CAG (composite of the CMV enhancer the chicken beta actin promoter (CBA) and the rabbit beta globin intron.), NSE (neuronal specific enolase), synapsin or NeuN promoters, the SV40 early promoter, mouse mammary tumor virus LTR promoter: adenovirus major late promoter (Ad MLP); a herpes simplex virus (HSV) promoter, a cytomegalovirus (CMV) promoter such as the CMV immediate early promoter region (CMVIE). SFFV promoter, rous sarcoma virus (RSV) promoter, synthetic promoters, hybrid promoters, and the like. Other promoters can be of human origin or from other species, including from mice. Common promoters include, e.g., the human cytomegalovirus (CMV) immediate early gene promoter, the SV40 early promoter, the Rous sarcoma virus long terminal repeat, [beta]-actin, rat insulin promoter, the phosphoglycerate kinase promoter, the human alpha-1 antitrypsin (hAAT) promoter, the transthyretin promoter, the TBG promoter and other liver-specific promoters, the desmin promoter and similar muscle-specific promoters, the EF1-alpha promoter, the CAG promoter and other constitutive promoters, hybrid promoters with multi-tissue specificity, promoters specific for neurons like synapsin and glyceraldehyde-3-phosphate dehydrogenase promoter, all of which are promoters well known and readily available to those of skill in the art, can be used to obtain high-level expression of the coding sequence of interest. In addition, sequences derived from non-viral genes, such as the murine metallothionein gene, will also find use herein. Such promoter sequences are commercially available from, e.g., Stratagene (San Diego, Calif.). Additional exemplary promoter sequences are described, for example, in WO2018213786A1 (incorporated by reference herein in its entirety).

[0193] In some embodiments, the apolipoprotein E enhancer (ApoE) or a functional fragment thereof is used, e.g., to drive expression in the liver. In some embodiments, two copies of the ApoE enhancer or a functional fragment thereof is used. In some embodiments, the ApoE enhancer or functional fragment thereof is used in combination with a promoter, e.g., the human alpha-1 antitrypsin (hAAT) promoter.

[0194] In some embodiments, the regulatory sequences impart tissue-specific gene expression capabilities. In some cases, the tissue-specific regulatory sequences bind tissue-specific transcription factors that induce transcription in a tissue specific manner. Various tissue-specific regulatory sequences (e.g., promoters, enhancers, etc.) are known in the art. Exemplary tissue-specific regulatory sequences include, but are not limited to, the following tissue-specific promoters: a liver-specific thyroxin binding globulin (TBG) promoter, a insulin promoter, a glucagon promoter, a somatostatin promoter, a pancreatic polypeptide (PPY) promoter, a synapsin-1 (Syn) promoter, a creatine kinase (MCK) promoter, a mammalian desmin (DES) promoter, a α-myosin heavy chain (a-MHC) promoter, or a cardiac Troponin T (cTnT) promoter. Other exemplary promoters include Beta-actin promoter, hepatitis B virus core promoter, Sandig et al., Gene Ther., 3:1002-9 (1996); alpha-fetoprotein (AFP) promoter. Arbuthnot et al., Hum. Gene Ther., 7:1503-14 (1996)), bone osteocalcin promoter (Stein et al., Mol. Biol. Rep., 24:185-96 (1997)); bone sialoprotein promoter (Chen et al., J. Bone Miner. Res., 11:654-64 (1996)), CD2 promoter (Hansal et al., J. Immunol., 161:1063-8 (1998); immunoglobulin heavy chain promoter: T cell receptor α-chain promoter, neuronal such as neuron-specific enolase (NSI) promoter (Andersen et al., Cell. Mol. Neurobiol., 13:503-15 (1993)), neurofilament light-chain gene promoter (Piccioli et al., Proc. Nati. Acad. Sci. USA. 88:5611-5 (1991)), and the neuron-specific vgf gene promoter (Piccioli et al., Neuron. 15:373-84 (1995)), and others. Additional exemplary promoter sequences are described, for example, in U.S. patent Ser. No. 10/300,146 (incorporated herein by reference in its entirety). In some embodiments, a tissue-specific regulatory element, e.g., a tissue-specific promoter, is selected from one known to be operably linked to a gene that is highly expressed in a given tissue, e.g., as measured by RNA-seq or protein expression data, or a combination thereof. Methods for analyzing tissue specificity by expression are taught in Fagerberg et al. Mol Cell Proteomics 13(2):397-406 (2014), which is incorporated herein by reference in its entirety.

[0195] In some embodiments, a vector described herein is a multicistronic expression construct. Multicistronic expression constructs include, for example, constructs harboring a first expression cassette, e.g. comprising a first promoter and a first encoding nucleic acid sequence, and a second expression cassette, e.g. comprising a second promoter and a second encoding nucleic acid sequence. Such multicistronic expression constructs may, in some instances, be particularly useful in the delivery of non-translated gene products, such as hairpin RNAs, together with a polypeptide, for example, a gene writer and gene writer template. In some embodiments, multicistronic expression constructs may exhibit reduced expression levels of one or more of the included transgenes, for example, because of promoter interference or the presence of incompatible nucleic acid elements in close proximity. If a multicistronic expression construct is part of a viral vector, the presence of a self-complementary nucleic acid sequence may, in some instances, interfere with the formation of structures necessary for viral reproduction or packaging.

[0196] In some embodiments, the sequence encodes an RNA with a hairpin. In some embodiments, the hairpin RNA is a guide RNA, a template RNA, shRNA, or a microRNA. In some embodiments, the first promoter is an RNA polymerase I promoter. In some embodiments, the first promoter is an RNA polymerase II promoter. In some embodiments, the second promoter is an RNA polymerase III promoter. In some embodiments, the second promoter is a U6 or H1 promoter. In some embodiments, the nucleic acid construct comprises the structure of AAV construct B1 or B2.

[0197] Without wishing to be bound by theory, multicistronic expression constructs may not achieve optimal expression levels as compared to expression systems containing only one cistron. One of the suggested causes of lower expression levels achieved with multicistronic expression constructs comprising two or more promoter elements is the phenomenon of promoter interference (see, e.g., Curtin J A, Dane A P, Swanson A, Alexander I E, Ginn S L. Bidirectional promoter interference between two widely used internal heterologous promoters in a late-generation lentiviral construct. Gene Ther. 2008 March; 15(5):384-90; and Martin-Duque P, Jezzard S. Kaftansis L. Vassaux G. Direct comparison of the insulating properties of no genetic elements in an adenoviral vector containing two different expression cassettes. Hum Gene Ther. 2004 October; 1510):995-1002: both references incorporated herein by reference for disclosure of promoter interference phenomenon). In some embodiments, the problem of promoter interference may be overcome, e.g., by producing multicistronic expression constructs comprising only one promoter driving transcription of multiple encoding nucleic acid sequences separated by internal ribosomal entry sites, or by separating cistrons comprising their own promoter with transcriptional insulator elements. In some embodiments, single-promoter driven expression of multiple cistrons may result in uneven expression levels of the cistrons. In some embodiments, a promoter cannot efficiently be isolated and isolation elements may not be compatible with some gene transfer vectors, for example, some retroviral vectors.

### MicroRNAs

[0198] miRNAs and other small interfering nucleic acids generally regulate gene expression via target RNA transcript cleavage/degradation or translational repression of the target messenger RNA (mRNA), miRNAs may, in some instances, be natively expressed, typically as final 19-25 non-translated RNA products, miRNAs generally exhibit their activity through sequence-specific interactions with the 3′ untranslated regions (UTR) of target mRNAs. These endogenously expressed miRNAs may form hairpin precursors that are subsequently processed into an miRNA duplex, and further into a mature single stranded miRNA molecule. This mature miRNA generally guides a multiprotein complex, miRISC, which identifies target 3′ UTR regions of target mRNAs based upon their complementarity to the mature miRNA. Useful transgene products may include, for example, miRNAs or miRNA binding sites that regulate the expression of a linked polypeptide. A non-limiting list of miRNA genes; the products of these genes and their homologues are useful as transgenes or as targets for small interfering nucleic acids (e.g., miRNA sponges, antisense oligonucleotides), e.g., in methods such as those listed in U.S. Ser. No. 10/300,146, 22:25-25:48, incorporated by reference. In some embodiments, one or more binding sites for one or more of the foregoing mi RNAs are incorporated in a transgene, e.g., a transgene delivered by a rAAV vector, e.g., to inhibit the expression of the transgene in one or more tissues of an animal harboring the transgene. In some embodiments, a binding site may be selected to control the expression of a transgene in a tissue specific manner. For example, binding sites for the liver-specific miR-122 may be incorporated into a transgene to inhibit expression of that transgene in the liver. Additional exemplary miRNA sequences are described, for example, in U.S. patent Ser. No. 10/300,146 (incorporated herein by reference in its entirety).

[0199] A miR inhibitor or miRNA inhibitor is generally an agent that blocks miRNA expression and/or processing. Examples of such agents include, but are not limited to, microRNA antagonists, microRNA specific antisense, microRNA sponges, and microRNA oligonucleotides (double-stranded, hairpin, short oligonucleotides) that inhibit miRNA interaction with a Drosha complex. MicroRNA inhibitors, e.g., miRNA sponges, can be expressed in cells from transgenes (e.g., as described in Ebert, M. S. Nature Methods. Epub Aug. 12, 2007; incorporated by reference herein in its entirety). In some embodiments, microRNA sponges, or other miR inhibitors, are used with the AAVs, microRNA sponges generally specifically inhibit miRNAs through a complementary heptameric seed sequence. In some embodiments, an entire family of miRNAs can be silenced using a single sponge sequence. Other methods for silencing miRNA function (derepression of miRNA targets) in cells will be apparent to one of ordinary skill in the art.

[0200] In some embodiments, a miRNA as described herein comprises a sequence listed in Table 4 of PCT Publication No. WO2020014209, incorporated herein by reference. Also incorporated herein by reference are the listing of exemplary miRNA sequences from WO2020014209.

### 5′ UTR and 3′ UTR

[0201] In certain embodiments, a nucleic acid comprising an open reading frame encoding a Gene Writer polypeptide (e.g., as described herein) comprises a 5′ UTR and/or a 3′ UTR. In embodiments, a 5′ UTR and 3′ UTR for protein expression, e.g., mRNA (or DNA encoding the RNA) for a Gene Writer polypeptide or heterologous object sequence, comprise optimized expression sequences. In some embodiments, the 5′ UTR comprises GGGAAAUAAGAGAGAAAAGAAGAGUAAGAAGAAAUAUAAGAGCCACC (SEQ ID NO: 1867) and/or the 3′ UTR comprising UGAUAAUAGGCUGGAGCCUCGGUGGCCAUGCUUCUUGCCCCUUGGGCCUCCCCCC AGCCCCUCCUCCCCUUCCUGCACCCGUACCCCCGUGGUCUUUGAAUAAAGUCUGA (SEQ ID NO: 1868), e.g., as described in Richner et al. Cell 168(6): P1114-1125 (2017), the sequences of which are incorporated herein by reference.

[0202] In some embodiments, an open reading frame of a Gene Writer system, e.g., an ORF of an mRNA (or DNA encoding an mRNA) encoding a Gene Writer polypeptide or one or more ORFs of an mRNA (or DNA encoding an mRNA) of a heterologous object sequence, is flanked by a 5′ and/or 3′ untranslated region (UTR) that enhances the expression thereof. In some embodiments, the 5′ UTR of an mRNA component (or transcript produced from a DNA component) of the system comprises the sequence 5′-GGGAAAUAAGAGAGAAAAGAAGAGUAAGAAGAAAUAUAAGAGCCACC-3′ (SEQ ID NO: 1869). In some embodiments, the 3′ UTR of an mRNA component (or transcript produced from a DNA component) of the system comprises the sequence 5′-UGAUAAUAGGCUGGAGCCUCGGUGGCCAUGCUUCUUGCCCCUUGGGCCUCCCCCC AGCCCCUCCUCCCCUUCCUGCACCCGUACCCCCGUGGUCUUUGAAUAAAGUCUGA-3′ (SEQ ID NO: 1870). This combination of 5′ UTR and 3′ UTR has been shown to result in desirable expression of an operably linked ORF by Richner et al. Cell 168(6): P1114-1125 (2017), the teachings and sequences of which are incorporated herein by reference. In some embodiments, a system described herein comprises a DNA encoding a transcript, wherein the DNA comprises the corresponding 5′ UTR and 3′ UTR sequences, with T substituting for U in the above-listed sequence). In some embodiments, a DNA vector used to produce an RNA component of the system further comprises a promoter upstream of the 5′ UTR for initiating in vitro transcription, e.g, a T7, T3, or SP6 promoter. The 5′ UTR above begins with GGG, which is a suitable start for optimizing transcription using T7 RNA polymerase. For tuning transcription levels and altering the transcription start site nucleotides to fit alternative 5′ UTRs, the teachings of Davidson et al. Pac Symp Biocomput 433-443 (2010) describe T7 promoter variants, and the methods of discovery thereof, that fulfill both of these traits.

### Viral Vectors and Components Thereof

[0203] Viruses are a useful source of delivery vehicles for the systems described herein, in addition to a source of relevant enzymes or domains as described herein, e.g., as sources of recombinases and DNA binding domains used herein, e.g., Cre recombinase, lambda integrase, or the DNA binding domains from AAV Rep proteins. Some enzymes may have multiple activities. In some embodiments, the virus used as a Gene Writer delivery system or a source of components thereof may be selected from a group as described by Baltimore Bacteriol Rev 35(3):235-241 (1971).

[0204] In some embodiments, the virus is selected from a Group I virus, e.g., is a DNA virus and packages dsDNA into virions. In some embodiments, the Group I virus is selected from, e.g., Adenoviruses, Herpesviruses, Poxviruses.

[0205] In some embodiments, the virus is selected from a Group II virus, e.g., is a DNA virus and packages ssDNA into virions. In some embodiments, the Group II virus is selected from, e.g., Parvoviruses. In some embodiments, the parvovirus is a dependoparvovirus, e.g., an adeno-associated virus (AAV).

[0206] In some embodiments, the virus is selected from a Group III virus, e.g., is an RNA virus and packages dsRNA into virions. In some embodiments, the Group III virus is selected from, e.g., Reoviruses. In some embodiments, one or both strands of the dsRNA contained in such virions is a coding molecule able to serve directly as mRNA upon transduction into a host cell, e.g., can be directly translated into protein upon transduction into a host cell without requiring any intervening nucleic acid replication or polymerization steps.

[0207] In some embodiments, the virus is selected from a Group IV virus, e.g., is an RNA virus and packages ssRNA(+) into virions. In some embodiments, the Group IV virus is selected from, e.g., Coronaviruses, Picornaviruses, Togaviruses. In some embodiments, the ssRNA(+) contained in such virions is a coding molecule able to serve directly as mRNA upon transduction into a host cell, e.g., can be directly translated into protein upon transduction into a host cell without requiring any intervening nucleic acid replication or polymerization steps.

[0208] In some embodiments, the virus is selected from a Group V virus, e.g., is an RNA virus and packages ssRNA(−) into virions. In some embodiments, the Group V virus is selected from, e.g., Orthomyxoviruses, Rhabdoviruses. In some embodiments, an RNA virus with an ssRNA(−) genome also carries an enzyme inside the virion that is transduced to host cells with the viral genome, e.g., an RNA-dependent RNA polymerase, capable of copying the ssRNA(−) into ssRNA(+) that can be translated directly by the host.

[0209] In some embodiments, the virus is selected from a Group VI virus, e.g., is a retrovirus and packages ssRNA(+) into virions. In some embodiments, the Group VI virus is selected from, e.g., Retroviruses. In some embodiments, the retrovirus is a lentivirus, e.g., HIV-1, HIV-2, SIV, BIV. In some embodiments, the retrovirus is a spumavirus, e.g., a foamy virus, e.g., HFV, SFV, BFV. In some embodiments, the ssRNA(+) contained in such virions is a coding molecule able to serve directly as mRNA upon transduction into a host cell, e.g., can be directly translated into protein upon transduction into a host cell without requiring any intervening nucleic acid replication or polymerization steps. In some embodiments, the ssRNA(+) is first reverse transcribed and copied to generate a dsDNA genome intermediate from which mRNA can be transcribed in the host cell. In some embodiments, an RNA virus with an ssRNA(+) genome also carries an enzyme inside the virion that is transduced to host cells with the viral genome, e.g., an RNA-dependent DNA polymerase, capable of copying the ssRNA(+) into dsDNA that can be transcribed into mRNA and translated by the host.

[0210] In some embodiments, the virus is selected from a Group VII virus, e.g., is a retrovirus and packages dsRNA into virions. In some embodiments, the Group VII virus is selected from, e.g., Hepadnaviruses. In some embodiments, one or both strands of the dsRNA contained in such virions is a coding molecule able to serve directly as mRNA upon transduction into a host cell, e.g., can be directly translated into protein upon transduction into a host cell without requiring any intervening nucleic acid replication or polymerization steps. In some embodiments, one or both strands of the dsRNA contained in such virions is first reverse transcribed and copied to generate a dsDNA genome intermediate from which mRNA can be transcribed in the host cell. In some embodiments, an RNA virus with a dsRNA genome also carries an enzyme inside the virion that is transduced to host cells with the viral genome, e.g., an RNA-dependent DNA polymerase, capable of copying the dsRNA into dsDNA that can be transcribed into mRNA and translated by the host.

[0211] In some embodiments, virions used to deliver nucleic acid in this invention may also carry enzymes involved in the process of Gene Writing. For example, a virion may contain a recombinase domain that is delivered into a host cell along with the nucleic acid. In some embodiments, a template nucleic acid may be associated with a Gene Writer polypeptide within a virion, such that both are co-delivered to a target cell upon transduction of the nucleic acid from the viral particle. In some embodiments, the nucleic acid in a virion may comprise DNA, e.g., linear ssDNA, linear dsDNA, circular ssDNA, circular dsDNA, minicircle DNA, dbDNA, ceDNA. In some embodiments, the nucleic acid in a virion may comprise RNA, e.g., linear ssRNA, linear dsRNA, circular ssRNA, circular dsRNA. In some embodiments, a viral genome may circularize upon transduction into a host cell, e.g., a linear ssRNA molecule may undergo a covalent linkage to form a circular ssRNA, a linear dsRNA molecule may undergo a covalent linkage to form a circular dsRNA or one or more circular ssRNA. In some embodiments, a viral genome may replicate by rolling circle replication in a host cell. In some embodiments, a viral genome may comprise a single nucleic acid molecule, e.g., comprise a non-segmented genome. In some embodiments, a viral genome may comprise two or more nucleic acid molecules, e.g., comprise a segmented genome. In some embodiments, a nucleic acid in a virion may be associated with one or proteins. In some embodiments, one or more proteins in a virion may be delivered to a host cell upon transduction. In some embodiments, a natural virus may be adapted for nucleic acid delivery by the addition of virion packaging signals to the target nucleic acid, wherein a host cell is used to package the target nucleic acid containing the packaging signals.

[0212] In some embodiments, a virion used as a delivery vehicle may comprise a commensal human virus. In some embodiments, a virion used as a delivery vehicle may comprise an anellovirus, the use of which is described in WO2018232017A1, which is incorporated herein by reference in its entirety.

### Production of Compositions and Systems

[0213] As will be appreciated by one of skill, methods of designing and constructing nucleic acid constructs and proteins or polypeptides (such as the systems, constructs and polypeptides described herein) are routine in the art. Generally, recombinant methods may be used. See, in general, Smales & James (Eds.), Therapeutic Proteins: Methods and Protocols (Methods in Molecular Biology), Humana Press (2005); and Crommelin, Sindelar & Meibohm (Eds.), Pharmaceutical Biotechnology: Fundamentals and Applications, Springer (2013). Methods of designing, preparing, evaluating, purifying and manipulating nucleic acid compositions are described in Green and Sambrook (Eds.), Molecular Cloning: A Laboratory Manual (Fourth Edition), Cold Spring Harbor Laboratory Press (2012).

[0214] Exemplary methods for producing a therapeutic pharmaceutical protein or polypeptide described herein involve expression in mammalian cells, although recombinant proteins can also be produced using insect cells, yeast, bacteria, or other cells under control of appropriate promoters. Mammalian expression vectors may comprise non-transcribed elements such as an origin of replication, a suitable promoter, and other 5′ or 3′ flanking non-transcribed sequences, and 5′ or 3′ non-translated sequences such as necessary ribosome binding sites, a polyadenylation site, splice donor and acceptor sites, and termination sequences. DNA sequences derived from the SV40 viral genome, for example, SV40 origin, early promoter, splice, and polyadenylation sites may be used to provide other genetic elements required for expression of a heterologous DNA sequence. Appropriate cloning and expression vectors for use with bacterial, fungal, yeast, and mammalian cellular hosts are described in Green & Sambrook, Molecular Cloning: A Laboratory Manual (Fourth Edition), Cold Spring Harbor Laboratory Press (2012).

[0215] Various mammalian cell culture systems can be employed to express and manufacture recombinant protein. Examples of mammalian expression systems include CHO, COS, HEK293, HeLA, and BHK cell lines. Processes of host cell culture for production of protein therapeutics are described in Zhou and Kantardjieff (Eds.), Mammalian Cell Cultures for Biologics Manufacturing (Advances in Biochemical Engineering/Biotechnology), Springer (2014). Compositions described herein may include a vector, such as a viral vector, e.g., a lentiviral vector, encoding a recombinant protein. In some embodiments, a vector, e.g., a viral vector, may comprise a nucleic acid encoding a recombinant protein.

[0216] Purification of protein therapeutics is described in Franks, Protein Biotechnology: Isolation, Characterization, and Stabilization, Humana Press (2013); and in Cutler, Protein Purification Protocols (Methods in Molecular Biology), Humana Press (2010).

[0217] RNAs (e.g., a gRNA or an mRNA, e.g., an mRNA encoding a GeneWriter) may also be produced as described herein. In some embodiments, RNA segments may be produced by chemical synthesis. In some embodiments, RNA segments may be produced by in vitro transcription of a nucleic acid template, e.g., by providing an RNA polymerase to act on a cognate promoter of a DNA template to produce an RNA transcript. In some embodiments, in vitro transcription is performed using, e.g., a T7, T3, or SP6 RNA polymerase, or a derivative thereof, acting on a DNA, e.g., dsDNA, ssDNA, linear DNA, plasmid DNA, linear DNA amplicon, linearized plasmid DNA, e.g., encoding the RNA segment, e.g., under transcriptional control of a cognate promoter, e.g., a T7, T3, or SP6 promoter. In some embodiments, a combination of chemical synthesis and in vitro transcription is used to generate the RNA segments for assembly. In embodiments, the gRNA is produced by chemical synthesis and the heterologous object sequence segment is produced by in vitro transcription. Without wishing to be bound by theory, in vitro transcription may be better suited for the production of longer RNA molecules. In some embodiments, reaction temperature for in vitro transcription may be lowered, e.g., be less than 37° C. (e.g., between 0-10 C, 10-20 C, or 20-30 C), to result in a higher proportion of full-length transcripts (see Krieg Nucleic Acids Res 18:6463 (1990), which is herein incorporated by reference in its entirety). In some embodiments, a protocol for improved synthesis of long transcripts is employed to synthesize a long RNA, e.g., an RNA greater than 5 kb, such as the use of e.g., T7 RiboMAX Express, which can generate 27 kb transcripts in vitro (Thiel et al. J Gen Virol 82(6):1273-1281 (2001)). In some embodiments, modifications to RNA molecules as described herein may be incorporated during synthesis of RNA segments (e.g., through the inclusion of modified nucleotides or alternative binding chemistries), following synthesis of RNA segments through chemical or enzymatic processes, following assembly of one or more RNA segments, or a combination thereof.

[0218] In some embodiments, an mRNA of the system (e.g., an mRNA encoding a Gene Writer polypeptide) is synthesized in vitro using T7 polymerase-mediated DNA-dependent RNA transcription from a linearized DNA template, where UTP is optionally substituted with 1-methylpseudoUTP. In some embodiments, the transcript incorporates 5′ and 3′ UTRs, e.g., GGGAAAUAAGAGAGAAAAGAAGAGUAAGAAGAAAUAUAAGAGCCACC (SEQ ID NO: 1871) and UGAUAAUAGGCUGGAGCCUCGGUGGCCAUGCUUCUUGCCCCUUGGGCCUCCCCCC AGCCCCUCCUCCCCUUCCUGCACCCGUACCCCCGUGGUCUUUGAAUAAAGUCUGA (SEQ ID NO: 1872), or functional fragments or variants thereof, and optionally includes a poly-A tail, which can be encoded in the DNA template or added enzymatically following transcription. In some embodiments, a donor methyl group, e.g., S-adenosylmethionine, is added to a methylated capped RNA with cap 0 structure to yield a cap 1 structure that increases mRNA translation efficiency (Richner et al. Cell 168(6): P1114-1125 (2017)).

[0219] In some embodiments, the transcript from a T7 promoter starts with a GGG motif. In some embodiments, a transcript from a T7 promoter does not start with a GGG motif. It has been shown that a GGG motif at the transcriptional start, despite providing superior yield, may lead to T7 RNAP synthesizing a ladder of poly(G) products as a result of slippage of the transcript on the three C residues in the template strand from +1 to +3 (Imburgio et al. Biochemistry 39(34):10419-10430 (2000). For tuning transcription levels and altering the transcription start site nucleotides to fit alternative 5′ UTRs, the teachings of Davidson et al. Pac Symp Biocomput 433-443 (2010) describe T7 promoter variants, and the methods of discovery thereof, that fulfill both of these traits.

[0220] In some embodiments, RNA segments may be connected to each other by covalent coupling. In some embodiments, an RNA ligase, e.g., T4 RNA ligase, may be used to connect two or more RNA segments to each other. When a reagent such as an RNA ligase is used, a 5′ terminus is typically linked to a 3′ terminus. In some embodiments, if two segments are connected, then there are two possible linear constructs that can be formed (i.e., (1) 5′-Segment 1-Segment 2-3′ and (2) 5′-Segment 2-Segment 1-3′). In some embodiments, intramolecular circularization can also occur. Both of these issues can be addressed, for example, by blocking one 5′ terminus or one 3′ terminus so that RNA ligase cannot ligate the terminus to another terminus. In embodiments, if a construct of 5′-Segment 1-Segment 2-3′ is desired, then placing a blocking group on either the 5′ end of Segment 1 or the 3′ end of Segment 2 may result in the formation of only the correct linear ligation product and/or prevent intramolecular circularization. Compositions and methods for the covalent connection of two nucleic acid (e.g., RNA) segments are disclosed, for example, in US20160102322A1 (incorporated herein by reference in its entirety), along with methods including the use of an RNA ligase to directionally ligate two single-stranded RNA segments to each other.

[0221] One example of an end blocker that may be used in conjunction with, for example, T4 RNA ligase, is a dideoxy terminator. T4 RNA ligase typically catalyzes the ATP-dependent ligation of phosphodiester bonds between 5′-phosphate and 3′-hydroxyl termini. In some embodiments, when T4 RNA ligase is used, suitable termini must be present on the termini being ligated. One means for blocking T4 RNA ligase on a terminus comprises failing to have the correct terminus format. Generally, termini of RNA segments with a 5-hydroxyl or a 3′-phosphate will not act as substrates for T4 RNA ligase.

[0222] Additional exemplary methods that may be used to connect RNA segments is by click chemistry (e.g., as described in U.S. Pat. Nos. 7,375,234 and 7,070,941, and US Patent Publication No. 2013/0046084, the entire disclosures of which are incorporated herein by reference). For example, one exemplary click chemistry reaction is between an alkyne group and an azide group (see FIG. 11 of US20160102322A1, which is incorporated herein by reference in its entirety). Any click reaction may potentially be used to link RNA segments (e.g., Cu-azide-alkyne, strain-promoted-azide-alkyne, staudinger ligation, tetrazine ligation, photo-induced tetrazole-alkene, thiol-ene, NHS esters, epoxides, isocyanates, and aldehyde-aminooxy). In some embodiments, ligation of RNA molecules using a click chemistry reaction is advantageous because click chemistry reactions are fast, modular, efficient, often do not produce toxic waste products, can be done with water as a solvent, and/or can be set up to be stereospecific.

[0223] In some embodiments, RNA segments may be connected using an Azide-Alkyne Huisgen Cycloaddition, reaction, which is typically a 1,3-dipolar cycloaddition between an azide and a terminal or internal alkyne to give a 1,2,3-triazole for the ligation of RNA segments. Without wishing to be bound by theory, one advantage of this ligation method may be that this reaction can initiated by the addition of required Cu(I) ions. Other exemplary mechanisms by which RNA segments may be connected include, without limitation, the use of halogens (F—, Br—, I—)/alkynes addition reactions, carbonyls/sulfhydryls/maleimide, and carboxyl/amine linkages. For example, one RNA molecule may be modified with thiol at 3′ (using disulfide amidite and universal support or disulfide modified support), and the other RNA molecule may be modified with acrydite at 5′ (using acrylic phosphoramidite), then the two RNA molecules can be connected by a Michael addition reaction. This strategy can also be applied to connecting multiple RNA molecules stepwise. Also provided are methods for linking more than two (e.g., three, four, five, six, etc.) RNA molecules to each other. Without wishing to be bound by theory, this may be useful when a desired RNA molecule is longer than about 40 nucleotides, e.g., such that chemical synthesis efficiency degrades, e.g., as noted in US20160102322A1 (incorporated herein by reference in its entirety).

[0224] By way of illustration, a tracrRNA is typically around 80 nucleotides in length. Such RNA molecules may be produced, for example, by processes such as in vitro transcription or chemical synthesis. In some embodiments, when chemical synthesis is used to produce such RNA molecules, they may be produced as a single synthesis product or by linking two or more synthesized RNA segments to each other. In embodiments, when three or more RNA segments are connected to each other, different methods may be used to link the individual segments together. Also, the RNA segments may be connected to each other in one pot (e.g., a container, vessel, well, tube, plate, or other receptacle), all at the same time, or in one pot at different times or in different pots at different times. In a non-limiting example, to assemble RNA Segments 1, 2 and 3 in numerical order, RNA Segments 1 and 2 may first be connected, 5′ to 3′, to each other. The reaction product may then be purified for reaction mixture components (e.g., by chromatography), then placed in a second pot, for connection of the 3′ terminus with the 5′ terminus of RNA Segment 3. The final reaction product may then be connected to the 5′ terminus of RNA Segment 3.

[0225] In another non-limiting example, RNA Segment 1 (about 30 nucleotides) is the target locus recognition sequence of a crRNA and a portion of Hairpin Region 1. RNA Segment 2 (about 35 nucleotides) contains the remainder of Hairpin Region 1 and some of the linear tracrRNA between Hairpin Region 1 and Hairpin Region 2. RNA Segment 3 (about 35 nucleotides) contains the remainder of the linear tracrRNA between Hairpin Region 1 and Hairpin Region 2 and all of Hairpin Region 2. In this example, RNA Segments 2 and 3 are linked, 5′ to 3′, using click chemistry. Further, the 5′ and 3′ end termini of the reaction product are both phosphorylated. The reaction product is then contacted with RNA Segment 1, having a 3′ terminal hydroxyl group, and T4 RNA ligase to produce a guide RNA molecule.

[0226] A number of additional linking chemistries may be used to connect RNA segments according to method of the invention. Some of these chemistries are set out in Table 6 of US20160102322A1, which is incorporated herein by reference in its entirety.

### Vectors

[0227] The disclosure provides, in part, a nucleic acid, e.g., vector, encoding a Gene Writer polypeptide described herein, a template nucleic acid described herein, or both. In some embodiments, a vector comprises a selective marker, e.g., an antibiotic resistance marker. In some embodiments, the antibiotic resistance marker is a kanamycin resistance marker. In some embodiments, the antibiotic resistance marker does not confer resistance to beta-lactam antibiotics. In some embodiments, the vector does not comprise an ampicillin resistance marker. In some embodiments, the vector comprises a kanamycin resistance marker and does not comprise an ampicillin resistance marker. In some embodiments, a vector encoding a Gene Writer polypeptide is integrated into a target cell genome (e.g., upon administration to a target cell, tissue, organ, or subject). In some embodiments, a vector encoding a Gene Writer polypeptide is not integrated into a target cell genome (e.g., upon administration to a target cell, tissue, organ, or subject). In some embodiments, a vector comprising a template nucleic acid (e.g., template DNA) is not integrated into a target cell genome (e.g., upon administration to a target cell, tissue, organ, or subject). In some embodiments, if a vector is integrated into a target site in a target cell genome, the selective marker is not integrated into the genome. In some embodiments, if a vector is integrated into a target site in a target cell genome, genes or sequences involved in vector maintenance (e.g., plasmid maintenance genes) are not integrated into the genome. In some embodiments, if a vector is integrated into a target site in a target cell genome, transfer regulating sequences (e.g., inverted terminal repeats, e.g., from an AAV) are not integrated into the genome. In some embodiments, administration of a vector (e.g., encoding a Gene Writer polypeptide described herein, a template nucleic acid described herein, or both) to a target cell, tissue, organ, or subject results in integration of a portion of the vector into one or more target sites in the genome(s) of said target cell, tissue, organ, or subject. In some embodiments, less than 99, 95, 90, 80, 70, 60, 50, 40, 30, 20, 10, 5, 4, 3, 2, or 1% of target sites (e.g., no target sites) comprising integrated material comprise a selective marker (e.g., an antibiotic resistance gene), a transfer regulating sequence (e.g., an inverted terminal repeat, e.g., from an AAV), or both from the vector.

[0228] AAV Vectors

[0229] In some embodiments, the vector encoding a Gene Writer polypeptide described herein, a template nucleic acid described herein, or both, is an adeno-associated virus (AAV) vector, e.g., comprising an AAV genome. In some embodiments, the AAV genome comprises two genes that encode four replication proteins and three capsid proteins, respectively. In some embodiments, the genes are flanked on either side by 145-bp inverted terminal repeats (ITRs). In some embodiments, the virion comprises up to three capsid proteins (Vp1, Vp2, and/or Vp3), e.g., produced in a 1:1:10 ratio. In some embodiments, the capsid proteins are produced from the same open reading frame and/or from differential splicing (Vp1) and alternative translational start sites (Vp2 and Vp3, respectively). Generally, Vp3 is the most abundant subunit in the virion and participates in receptor recognition at the cell surface defining the tropism of the virus. In some embodiments, Vp1 comprises a phospholipase domain, e.g., which functions in viral infectivity, in the N-terminus of Vp1.

[0230] In some embodiments, packaging capacity of the viral vectors limits the size of the base editor that can be packaged into the vector. For example, the packaging capacity of the AAVs can be about 4.5 kb (e.g., about 3.0, 3.5, 4.0, 4.5, 5.0, 5.5, or 6.0 kb), e.g., including one or two inverted terminal repeats (ITRs), e.g., 145 base ITRs.

[0231] In some embodiments, recombinant AAV (rAAV) comprises cis-acting 145-bp ITRs flanking vector transgene cassettes, e.g., providing up to 4.5 kb for packaging of foreign DNA. Subsequent to infection, rAAV can, in some instances, express a protein described herein and persist without integration into the host genome by existing episomally in circular head-to-tail concatemers. rAAV can be used, for example, in vitro and in vivo. In some embodiments, AAV-mediated gene delivery requires that the length of the coding sequence of the gene is equal or greater in size than the wild-type AAV genome.

[0232] AAV delivery of genes that exceed this size and/or the use of large physiological regulatory elements can be accomplished, for example, by dividing the protein(s) to be delivered into two or more fragments. In some embodiments, the N-terminal fragment is fused to a split intein-N. In some embodiments, the C-terminal fragment is fused to a split intein-C. In embodiments, the fragments are packaged into two or more AAV vectors.

[0233] In some embodiments, dual AAV vectors are generated by splitting a large transgene expression cassette in two separate halves (5 and 3 ends, or head and tail), e.g., wherein each half of the cassette is packaged in a single AAV vector (of <5 kb). The re-assembly of the full-length transgene expression cassette can, in some embodiments, then be achieved upon co-infection of the same cell by both dual AAV vectors. In some embodiments, co-infection is followed by one or more of: (1) homologous recombination (HR) between 5 and 3 genomes (dual AAV overlapping vectors); (2) ITR-mediated tail-to-head concatemerization of 5 and 3 genomes (dual AAV trans-splicing vectors); and/or (3) a combination of these two mechanisms (dual AAV hybrid vectors). In some embodiments, the use of dual AAV vectors in vivo results in the expression of full-length proteins. In some embodiments, the use of the dual AAV vector platform represents an efficient and viable gene transfer strategy for transgenes of greater than about 4.0, 4.1, 4.2, 4.3, 4.4, 4.5, 4.6, 4.7, 4.8, 4.9, or 5.0 kb in size. In some embodiments, AAV vectors can also be used to transduce cells with target nucleic acids, e.g., in the in vitro production of nucleic acids and peptides. In some embodiments, AAV vectors can be used for in vivo and ex vivo gene therapy procedures (see, e.g., West et al., Virology 160:38-47 (1987); U.S. Pat. No. 4,797,368; WO 93/24641; Kotin, Human Gene Therapy 5:793-801 (1994); Muzyczka, J. Clin. Invest. 94:1351 (1994); each of which is incorporated herein by reference in their entirety). The construction of recombinant AAV vectors is described in a number of publications, including U.S. Pat. No. 5,173,414; Tratschin et al., Mol. Cell. Biol. 5:3251-3260 (1985); Tratschin, et al., Mol. Cell. Biol. 4:2072-2081 (1984); Hermonat & Muzyczka, PNAS 81:6466-6470 (1984); and Samulski et al., J. Virol. 63:03822-3828 (1989) (incorporated by reference herein in their entirety).

[0234] In some embodiments, a Gene Writer described herein (e.g., with or without one or more guide nucleic acids) can be delivered using AAV, lentivirus, adenovirus or other plasmid or viral vector types, in particular, using formulations and doses from, for example, U.S. Pat. No. 8,454,972 (formulations, doses for adenovirus), U.S. Pat. No. 8,404,658 (formulations, doses for AAV) and U.S. Pat. No. 5,846,946 (formulations, doses for DNA plasmids) and from clinical trials and publications regarding the clinical trials involving lentivirus, AAV and adenovirus. For example, for AAV, the route of administration, formulation and dose can be as described in U.S. Pat. No. 8,454,972 and as in clinical trials involving AAV. For Adenovirus, the route of administration, formulation and dose can be as described in U.S. Pat. No. 8,404,658 and as in clinical trials involving adenovirus. For plasmid delivery, the route of administration, formulation and dose can be as described in U.S. Pat. No. 5,846,946 and as in clinical studies involving plasmids. Doses can be based on or extrapolated to an average 70 kg individual (e.g. a male adult human), and can be adjusted for patients, subjects, mammals of different weight and species. Frequency of administration is within the ambit of the medical or veterinary practitioner (e.g., physician, veterinarian), depending on usual factors including the age, sex, general health, other conditions of the patient or subject and the particular condition or symptoms being addressed. In some embodiments, the viral vectors can be injected into the tissue of interest. For cell-type specific Gene Writing, the expression of the Gene Writer and optional guide nucleic acid can, in some embodiments, be driven by a cell-type specific promoter.

[0235] In some embodiments, AAV allows for low toxicity, for example, due to the purification method not requiring ultracentrifugation of cell particles that can activate the immune response. In some embodiments, AAV allows low probability of causing insertional mutagenesis, for example, because it does not substantially integrate into the host genome.

[0236] In some embodiments, AAV has a packaging limit of about 4.4, 4.5, 4.6, 4.7, or 4.75 kb. In some embodiments, a Gene Writer, promoter, and transcription terminator can fit into a single viral vector. SpCas9 (4.1 kb) may, in some instances, be difficult to package into AAV. Therefore, in some embodiments, a Gene Writer is used that is shorter in length than other Gene Writers or base editors. In some embodiments, the Gene Writers are less than about 4.5 kb, 4.4 kb, 4.3 kb, 4.2 kb, 4.1 kb, 4 kb, 3.9 kb, 3.8 kb, 3.7 kb, 3.6 kb, 3.5 kb, 3.4 kb, 3.3 kb, 3.2 kb, 3.1 kb, 3 kb, 2.9 kb, 2.8 kb, 2.7 kb, 2.6 kb, 2.5 kb, 2 kb, or 1.5 kb.

[0237] An AAV can be AAV1, AAV2, AAV5 or any combination thereof. In some embodiments, the type of AAV is selected with respect to the cells to be targeted; e.g., AAV serotypes 1, 2, 5 or a hybrid capsid AAV1, AAV2, AAV5 or any combination thereof can be selected for targeting brain or neuronal cells; or AAV4 can be selected for targeting cardiac tissue. In some embodiments, AAV8 is selected for delivery to the liver. Exemplary AAV serotypes as to these cells are described, for example, in Grimm, D. et al, J. Virol. 82: 5887-5911 (2008) (incorporated herein by reference in its entirety). In some embodiments, AAV refers all serotypes, subtypes, and naturally-occurring AAV as well as recombinant AAV. AAV may be used to refer to the virus itself or a derivative thereof. In some embodiments, AAV includes AAV1, AAV2, AAV3, AAV3B, AAV4, AAV5, AAV6, AAV6.2, AAV7, AAVrh.64R1, AAVhu.37, AAVrh.8, AAVrh.32.33, AAV8, AAV9, AAV-DJ, AAV2/8, AAVrhlO, AAVLK03, AV10, AAV11, AAV 12, rhlO, and hybrids thereof, avian AAV, bovine AAV, canine AAV, equine AAV, primate AAV, nonprimate AAV, and ovine AAV. The genomic sequences of various serotypes of AAV, as well as the sequences of the native terminal repeats (TRs), Rep proteins, and capsid subunits are known in the art. Such sequences may be found in the literature or in public databases such as GenBank. Additional exemplary AAV serotypes are listed in Table 7.

TABLE 7
Viral delivery modalities

| Target Tissue | Vehicle | Reference |
|---|---|---|
| Liver | AAV (AAV8¹, AAVrh.8¹, | 1. Wang et al., Mol. Ther. 18, |
| | AAVhu.37¹, AAV2/8, | 118-25 (2010) |
| | AAV2/rh10², AAV9, AAV2, | 2. Ginn et al., JHEP Reports, |
| | NP40³, NP59^{2,3}, AAV3B⁵, | 100065 (2019) |
| | AAV-DJ⁴, AAV-LK01⁴, | 3. Paulk et al., Mol. Ther. 26, |
| | AAV-LK02⁴, AAV-LK03⁴, | 289-303 (2018). |
| | AAV-LK19⁴ | 4. L. Lisowski et al., Nature. |
| | Adenovirus (Ad5, HC-AdV⁶) | 506, 382-6 (2014). |
| | | 5. L. Wang et al., Mol. Ther. |
| | | 23, 1877-87 (2015). |
| | | 6. Hausl Mol Ther (2010) |
| Lung | AAV (AAV4, AAV5, | 1. Duncan et al., Mol Ther |
| | AAV6¹, AAV9, H22²) | Methods Clin Dev (2018) |
| | Adenovirus (Ad5, Ad3, | 2. Cooney et al., Am J Respir |
| | Ad21, Ad14)³ | Cell Mol Biol (2019) |
| | | 3. Li et al., Mol Ther Methods |
| | | Clin Dev (2019) |
| Skin | AAV6¹, AAV-LK19² | 1. Petek et al., Mol. Ther. |
| | | (2010) |
| | | 2. L. Lisowski et al., Nature. |
| | | 506, 382-6 (2014). |
| HSCs | HDAd5/35⁺⁺ | Wang et al. Blood Adv (2019) |

[0238] In some embodiments, a pharmaceutical composition (e.g., comprising an AAV as described herein) has less than 10% empty capsids, less than 8% empty capsids, less than 7% empty capsids, less than 5% empty capsids, less than 3% empty capsids, or less than 1% empty capsids. In some embodiments, the pharmaceutical composition has less than about 5% empty capsids. In some embodiments, the number of empty capsids is below the limit of detection. In some embodiments, it is advantageous for the pharmaceutical composition to have low amounts of empty capsids, e.g., because empty capsids may generate an adverse response (e.g., immune response, inflammatory response, liver response, and/or cardiac response), e.g., with little or no substantial therapeutic benefit.

[0239] In some embodiments, the residual host cell protein (rHCP) in the pharmaceutical composition is less than or equal to 100 ng/ml rHCP per 1×10¹³ vg/ml, e.g., less than or equal to 40 ng/ml rHCP per 1×10¹³ vg/ml or 1-50 ng/ml rHCP per 1×10¹³ vg/ml. In some embodiments, the pharmaceutical composition comprises less than 10 ng rHCP per 1.0×10¹³ vg, or less than 5 ng rHCP per 1.0×10¹³ vg, less than 4 ng rHCP per 1.0×10¹³ vg, or less than 3 ng rHCP per 1.0×10¹³ vg, or any concentration in between. In some embodiments, the residual host cell DNA (hcDNA) in the pharmaceutical composition is less than or equal to 5×10⁶ pg/ml hcDNA per 1×10¹³ vg/ml, less than or equal to 1.2×10⁶ pg/ml hcDNA per 1×10¹³ vg/ml, or 1×10⁵ pg/ml hcDNA per 1×10¹³ vg/ml. In some embodiments, the residual host cell DNA in said pharmaceutical composition is less than 5.0×10⁵ pg per 1×10¹³ vg, less than 2.0×10⁵ pg per 1.0×10¹³ vg, less than 1.1×10⁵ pg per 1.0×10¹³ vg, less than 1.0×10⁵ pg hcDNA per 1.0×10¹³ vg, less than 0.9×10⁵ pg hcDNA per 1.0×10¹³ vg, less than 0.8×10⁵ pg hcDNA per 1.0×10¹³ vg, or any concentration in between.

[0240] In some embodiments, the residual plasmid DNA in the pharmaceutical composition is less than or equal to 1.7×10⁵ pg/ml per 1.0×10¹³ vg/ml, or 1×10⁵ pg/ml per 1×1.0×10¹³ vg/ml, or 1.7×10⁶ pg/ml per 1.0×10¹³ vg/ml. In some embodiments, the residual DNA plasmid in the pharmaceutical composition is less than 10.0×10 5 pg by 1.0×10¹³ vg, less than 8.0×10⁵ pg by 1.0×10¹³ vg or less than 6.8×10 5 pg by 1.0×10¹³ vg. In embodiments, the pharmaceutical composition comprises less than 0.5 ng per 1.0×10¹³ vg, less than 0.3 ng per 1.0×10¹³ vg, less than 0.22 ng per 1.0×10¹³ vg or less than 0.2 ng per 1.0×10¹³ vg or any intermediate concentration of bovine serum albumin (BSA). In embodiments, the benzonase in the pharmaceutical composition is less than 0.2 ng by 1.0×10¹³ vg, less than 0.1 ng by 1.0×10¹³ vg, less than 0.09 ng by 1.0×10¹³ vg, less than 0.08 ng by 1.0×10¹³ vg or any intermediate concentration. In embodiments, Poloxamer 188 in the pharmaceutical composition is about 10 to 150 ppm, about 15 to 100 ppm or about 20 to 80 ppm. In embodiments, the cesium in the pharmaceutical composition is less than 50 pg/g (ppm), less than 30 pg/g (ppm) or less than 20 pg/g (ppm) or any intermediate concentration.

[0241] In embodiments, the pharmaceutical composition comprises total impurities, e.g., as determined by SDS-PAGE, of less than 10%, less than 8%, less than 7%, less than 6%, less than 5%, less than 4%, less than 3%, less than 2%, or any percentage in between. In embodiments, the total purity, e.g., as determined by SDS-PAGE, is greater than 90%, greater than 92%, greater than 93%, greater than 94%, greater than 95%, greater than 96%, greater than 97%, greater than 98%, or any percentage in between. In embodiments, no single unnamed related impurity, e.g., as measured by SDS-PAGE, is greater than 5%, greater than 4%, greater than 3% or greater than 2%, or any percentage in between. In embodiments, the pharmaceutical composition comprises a percentage of filled capsids relative to total capsids (e.g., peak 1+peak 2 as measured by analytical ultracentrifugation) of greater than 85%, greater than 86%, greater than 87%, greater than 88%, greater than 89%, greater than 90%, greater than 91%, greater than 91.9%, greater than 92%, greater than 93%, or any percentage in between. In embodiments of the pharmaceutical composition, the percentage of filled capsids measured in peak 1 by analytical ultracentrifugation is 20-80%, 25-75%, 30-75%, 35-75%, or 37.4-70.3%. In embodiments of the pharmaceutical composition, the percentage of filled capsids measured in peak 2 by analytical ultracentrifugation is 20-80%, 20-70%, 22-65%, 24-62%, or 24.9-60.1%.

[0242] In one embodiment, the pharmaceutical composition comprises a genomic titer of 1.0 to 5.0×10¹³ vg/mL, 1.2 to 3.0×10¹³ vg/mL or 1.7 to 2.3×10¹³ vg/ml. In one embodiment, the pharmaceutical composition exhibits a biological load of less than 5 CFU/mL, less than 4 CFU/mL, less than 3 CFU/mL, less than 2 CFU/mL or less than 1 CFU/mL or any intermediate contraction. In embodiments, the amount of endotoxin according to USP, for example, USP <85> (incorporated by reference in its entirety) is less than 1.0 EU/mL, less than 0.8 EU/mL or less than 0.75 EU/mL. In embodiments, the osmolarity of a pharmaceutical composition according to USP, for example, USP <785> (incorporated by reference in its entirety) is 350 to 450 mOsm/kg, 370 to 440 mOsm/kg or 390 to 430 mOsm/kg. In embodiments, the pharmaceutical composition contains less than 1200 particles that are greater than 25 m per container, less than 1000 particles that are greater than 25 m per container, less than 500 particles that are greater than 25 m per container or any intermediate value. In embodiments, the pharmaceutical composition contains less than 10,000 particles that are greater than 10 m per container, less than 8000 particles that are greater than 10 m per container or less than 600 particles that are greater than 10 pm per container.

[0243] In one embodiment, the pharmaceutical composition has a genomic titer of 0.5 to 5.0×10¹³ vg/mL, 1.0 to 4.0×10³ vg/mL, 1.5 to 3.0×10¹ vg/ml or 1.7 to 2.3×10¹³ vg/ml. In one embodiment, the pharmaceutical composition described herein comprises one or more of the following: less than about 0.09 ng benzonase per 1.0×10¹³ vg, less than about 30 pg/g (ppm) of cesium, about 20 to 80 ppm Poloxamer 188, less than about 0.22 ng BSA per 1.0×10¹³ vg, less than about 6.8×10⁵ pg of residual DNA plasmid per 1.0×10¹³ vg, less than about 1.1×10⁵ pg of residual hcDNA per 1.0×10¹³ vg, less than about 4 ng of rHCP per 1.0×10¹³ vg, pH 7.7 to 8.3, about 390 to 430 mOsm/kg, less than about 600 particles that are >25 μm in size per container, less than about 6000 particles that are >10 m in size per container, about 1.7×10¹³-2.3×10¹³ vg/mL genomic titer, infectious titer of about 3.9×10⁸ to 8.4×10¹⁰ IU per 1.0×10¹³ vg, total protein of about 100-300 pg per 1.0×10¹³ vg, mean survival of >24 days in A7SMA mice with about 7.5×10¹³ vg/kg dose of viral vector, about 70 to 130% relative potency based on an in vitro cell based assay and/or less than about 5% empty capsid. In various embodiments, the pharmaceutical compositions described herein comprise any of the viral particles discussed here, retain a potency of between ±20%, between ±15%, between ±10% or within ±5% of a reference standard. In some embodiments, potency is measured using a suitable in vitro cell assay or in vivo animal model.

[0244] Additional methods of preparation, characterization, and dosing AAV particles are taught in WO2019094253, which is incorporated herein by reference in its entirety.

[0245] Additional rAAV constructs that can be employed consonant with the invention include those described in Wang et al 2019, available at: //doi.org/10.1038/s41573-019-0012-9, including Table 1 thereof, which is incorporated by reference in its entirety.

### Kits, Articles of Manufacture, and Pharmaceutical Compositions

[0246] In an aspect the disclosure provides a kit comprising a Gene Writer or a Gene Writing system, e.g., as described herein. In some embodiments, the kit comprises a Gene Writer polypeptide (or a nucleic acid encoding the polypeptide) and a template DNA. In some embodiments, the kit further comprises a reagent for introducing the system into a cell, e.g., transfection reagent, LNP, and the like. In some embodiments, the kit is suitable for any of the methods described herein. In some embodiments, the kit comprises one or more elements, compositions (e.g., pharmaceutical compositions), Gene Writers, and/or Gene Writer systems, or a functional fragment or component thereof, e.g., disposed in an article of manufacture. In some embodiments, the kit comprises instructions for use thereof.

[0247] In an aspect, the disclosure provides an article of manufacture, e.g., in which a kit as described herein, or a component thereof, is disposed.

[0248] In an aspect, the disclosure provides a pharmaceutical composition comprising a Gene Writer or a Gene Writing system, e.g., as described herein. In some embodiments, the pharmaceutical composition further comprises a pharmaceutically acceptable carrier or excipient. In some embodiments, the pharmaceutical composition comprises a template DNA.

### Chemistry, Manufacturing, and Controls (CMC)

[0249] Purification of protein therapeutics is described, for example, in Franks, Protein Biotechnology: Isolation, Characterization, and Stabilization, Humana Press (2013); and in Cutler, Protein Purification Protocols (Methods in Molecular Biology), Humana Press (2010).

[0250] In some embodiments, a Gene Writer™ system, polypeptide, and/or template nucleic acid (e.g., template DNA) conforms to certain quality standards. In some embodiments, a Gene Writer™ system, polypeptide, and/or template nucleic acid (e.g., template DNA) produced by a method described herein conforms to certain quality standards. Accordingly, the disclosure is directed, in some aspects, to methods of manufacturing a Gene Writer™ system, polypeptide, and/or template nucleic acid that conforms to certain quality standards, e.g., in which said quality standards are assayed. The disclosure is also directed, in some aspects, to methods of assaying said quality standards in a Gene Writer™ system, polypeptide, and/or template nucleic acid. In some embodiments, quality standards include, but are not limited to, one or more (e.g., 1, 2, 3, 4, 5, 6, 7, 8, 9, 10, 11, or 12) of the following:

[0251] (i) the length of the template DNA or the mRNA encoding the GeneWriter polypeptide, e.g., whether the DNA or mRNA has a length that is above a reference length or within a reference length range, e.g., whether at least 80, 85, 90, 95, 96, 97, 98, or 99% of the DNA or mRNA present is greater than 100, 125, 150, 175, or 200 nucleotides long;

[0252] (ii) the presence, absence, and/or length of a polyA tail on the mRNA, e.g., whether at least 80, 85, 90, 95, 96, 97, 98, or 99% of the mRNA present contains a polyA tail (e.g., a polyA tail that is at least 5, 10, 20, 30, 50, 70, 100 nucleotides in length);

[0253] (iii) the presence, absence, and/or type of a 5′ cap on the mRNA, e.g., whether at least 80, 85, 90, 95, 96, 97, 98, or 99% of the mRNA present contains a 5′ cap, e.g., whether that cap is a 7-methylguanosine cap, e.g., a O-Me-m7G cap;

[0254] (iv) the presence, absence, and/or type of one or more modified nucleotides (e.g., selected from pseudouridine, dihydrouridine, inosine, 7-methylguanosine, 1-N-methylpseudouridine (1-Me-P), 5-methoxyuridine (5-MO-U), 5-methylcytidine (5mC), or a locked nucleotide) in the mRNA, e.g., whether at least 80, 85, 90, 95, 96, 97, 98, or 99% of the mRNA present contains one or more modified nucleotides;

[0255] (v) the stability of the template DNA or the mRNA (e.g., over time and/or under a pre-selected condition), e.g., whether at least 80, 85, 90, 95, 96, 97, 98, or 99% of the DNA or mRNA remains intact (e.g., greater than 100, 125, 150, 175, or 200 nucleotides long) after a stability test;

[0256] (vi) the potency of the template DNA or the mRNA in a system for modifying DNA, e.g., whether at least 1% of target sites are modified after a system comprising the DNA or mRNA is assayed for potency;

[0257] (vii) the length of the polypeptide, first polypeptide, or second polypeptide, e.g., whether the polypeptide, first polypeptide, or second polypeptide has a length that is above a reference length or within a reference length range, e.g., whether at least 80, 85, 90, 95, 96, 97, 98, or 99% of the polypeptide, first polypeptide, or second polypeptide present is greater than 600, 650, 700, 750, 800, 850, 900, 950, 1000, 1050, 1100, 1150, 1200, 1250, 1300, 1350, 1400, 1450, 1500, 1600, 1700, 1800, 1900, or 2000 amino acids long (and optionally, no larger than 2500, 2000, 1500, 1400, 1300, 1200, 1100, 1000, 900, 800, 700, or 600 amino acids long);

[0258] (viii) the presence, absence, and/or type of post-translational modification on the polypeptide, first polypeptide, or second polypeptide, e.g., whether at least 80, 85, 90, 95, 96, 97, 98, or 99% of the polypeptide, first polypeptide, or second polypeptide contains phosphorylation, methylation, acetylation, myristoylation, palmitoylation, isoprenylation, glipyatyon, or lipoylation, or any combination thereof;

[0259] (ix) the presence, absence, and/or type of one or more artificial, synthetic, or non-canonical amino acids (e.g., selected from ornithine, β-alanine, GABA, 6-Aminolevulinic acid, PABA, a D-amino acid (e.g., D-alanine or D-glutamate), aminoisobutyric acid, dehydroalanine, cystathionine, lanthionine, Djenkolic acid, Diaminopimelic acid, Homoalanine, Norvaline, Norleucine, Homonorleucine, homoserine, O-methyl-homoserine and O-ethyl-homoserine, ethionine, selenocysteine, selenohomocysteine, selenomethionine, selenoethionine, tellurocysteine, or telluromethionine) in the polypeptide, first polypeptide, or second polypeptide, e.g., whether at least 80, 85, 90, 95, 96, 97, 98, or 99% of the polypeptide, first polypeptide, or second polypeptide present contains one or more artificial, synthetic, or non-canonical amino acids;

[0260] (x) the stability of the polypeptide, first polypeptide, or second polypeptide (e.g., over time and/or under a pre-selected condition), e.g., whether at least 80, 85, 90, 95, 96, 97, 98, or 99% of the polypeptide, first polypeptide, or second polypeptide remains intact (e.g., greater than 600, 650, 700, 750, 800, 850, 900, 950, 1000, 1050, 1100, 1150, 1200, 1250, 1300, 1350, 1400, 1450, 1500, 1600, 1700, 1800, 1900, or 2000 amino acids long (and optionally, no larger than 2500, 2000, 1500, 1400, 1300, 1200, 1100, 1000, 900, 800, 700, or 600 amino acids long)) after a stability test;

[0261] (xi) the potency of the polypeptide, first polypeptide, or second polypeptide in a system for modifying DNA, e.g., whether at least 1% of target sites are modified after a system comprising the polypeptide, first polypeptide, or second polypeptide is assayed for potency; or

[0262] (xii) the presence, absence, and/or level of one or more of a pyrogen, virus, fungus, bacterial pathogen, or host cell protein, e.g., whether the system is free or substantially free of pyrogen, virus, fungus, bacterial pathogen, or host cell protein contamination.

[0263] In some embodiments, a system or pharmaceutical composition described herein is endotoxin free.

[0264] In some embodiments, the presence, absence, and/or level of one or more of a pyrogen, virus, fungus, bacterial pathogen, and/or host cell protein is determined. In embodiments, whether the system is free or substantially free of pyrogen, virus, fungus, bacterial pathogen, and/or host cell protein contamination is determined.

[0265] In some embodiments, a pharmaceutical composition or system as described herein has one or more (e.g., 1, 2, 3, or 4) of the following characteristics:

[0266] (a) less than 1% (e.g., less than 0.5%, 0.4%, 0.3%, 0.2%, or 0.1%) DNA template relative to the RNA encoding the polypeptide, e.g., on a molar basis;

[0267] (b) less than 1% (e.g., less than 0.5%, 0.4%, 0.3%, 0.2%, or 0.1%) uncapped RNA relative to the RNA encoding the polypeptide, e.g., on a molar basis;

[0268] (c) less than 1% (e.g., less than 0.5%, 0.4%, 0.3%, 0.2%, or 0.1%) partial length RNAs relative to the RNA encoding the polypeptide, e.g., on a molar basis;

[0269] (d) substantially lacks unreacted cap dinucleotides.

### Exemplary Heterologous Object Sequences

[0270] In some embodiments, the systems or methods provided herein comprise a heterologous object sequence, wherein the heterologous object sequence or a reverse complementary sequence thereof, encodes a protein (e.g., an antibody) or peptide. In some embodiments, the therapy is one approved by a regulatory agency such as FDA.

[0271] In some embodiments, the protein or peptide is a protein or peptide from the THPdb database (Usmani et al. PLoS One 12(7):e0181748 (2017), herein incorporated by reference in its entirety. In some embodiments, the protein or peptide is a protein or peptide disclosed in Table 8. In some embodiments, the systems or methods disclosed herein, for example, those comprising Gene Writers, may be used to integrate an expression cassette for a protein or peptide from Table 8 into a host cell to enable the expression of the protein or peptide in the host. In some embodiments, the sequences of the protein or peptide in the first column of Table 8 can be found in the patents or applications provided in the third column of Table 8, incorporated by reference in their entireties.

[0272] In some embodiments, the protein or peptide is an antibody disclosed in Table 1 of Lu et al. J Biomed Sci 27(1):1 (2020), herein incorporated by reference in its entirety. In some embodiments, the protein or peptide is an antibody disclosed in Table 9. In some embodiments, the systems or methods disclosed herein, for example, those comprising Gene Writers, may be used to integrate an expression cassette for an antibody from Table 9 into a host cell to enable the expression of the antibody in the host. In some embodiments, a system or method described herein is used to express an agent that binds a target of column 2 of Table 9 (e.g., a monoclonal antibody of column 1 of Table 9) in a subject having an indication of column 3 of Table 9.

TABLE 8
Exemplary protein and peptide therapeutics.

| Therapeutic peptide | Category | Patent Number |
|---|---|---|
| Lepirudin | Antithrombins and Fibrinolytic | CA1339104 |
| | Agents | |
| Cetuximab | Antineoplastic Agents | CA1340417 |
| Dor se alpha | Enzymes | CA2184581 |
| Denileukin diftitox | Antineoplastic Agents | |
| Etanercept | Immunosuppressive Agents | CA2476934 |
| Bivalirudin | Antithrombins | US7582727 |
| Leuprolide | Antineoplastic Agents | |
| Peginterferon alpha-2a | Immunosuppressive Agents | CA2203480 |
| Alteplase | Thrombolytic Agents | |
| Interferon alpha-n1 | Antiviral Agents | |
| Darbepoetin alpha | Anti-anemic Agents | CA2165694 |
| Reteplase | Fibrinolytic Agents | CA2107476 |
| Epoetin alpha | Hematinics | CA1339047 |
| Salmon Calcitonin | Bone Density Conservation | US6440392 |
| | Agents | |
| Interferon alpha-n3 | Immunosuppressive Agents | |
| Pegfilgrastim | Immunosuppressive Agents | CA1341537 |
| Sargramostim | Immunosuppressive Agents | CA1341150 |
| Secretin | Diagnostic Agents | |
| Peginterferon alpha-2b | Immunosuppressive Agents | CA1341567 |
| Asparagi se | Antineoplastic Agents | |
| Thyrotropin alpha | Diagnostic Agents | US5840566 |
| Antihemophilic Factor | Coagulants and Thrombotic agents | CA2124690 |
| A kinra | Antirheumatic Agents | CA2141953 |
| Gramicidin D | Anti-Bacterial Agents | |
| Intravenous | Immunologic Factors | |
| Immunoglobulin | | |
| Anistreplase | Fibrinolytic Agents | |
| Insulin Regular | Antidiabetic Agents | |
| Tenecteplase | Fibrinolytic Agents | CA2129660 |
| Menotropins | Fertility Agents | |
| Interferon gamma-1b | Immunosuppressive Agents | US6936695 |
| Interferon alpha-2a, | | CA2172664 |
| Recombi nt | | |
| Coagulation factor VIIa | Coagulants | |
| Oprelvekin | Antineoplastic Agents | |
| Palifermin | Anti-Mucositis Agents | |
| Glucagon recombi nt | Hypoglycemic Agents | |
| Aldesleukin | Antineoplastic Agents | |
| Botulinum Toxin Type B | Antidystonic Agents | |
| Omalizumab | Anti-Allergic Agents | CA2113813 |
| Lutropin alpha | Fertility Agents | US5767251 |
| Insulin Lispro | Hypoglycemic Agents | US5474978 |
| Insulin Glargine | Hypoglycemic Agents | US7476652 |
| Collage se | | |
| Rasburicase | Gout Suppressants | CA2175971 |
| Adalimumab | Antirheumatic Agents | CA2243459 |
| Imiglucerase | Enzyme Replacement Agents | US5549892 |
| Abciximab | Anticoagulants | CA1341357 |
| Alpha-1-protei se inhibitor | Serine Protei se Inhibitors | |
| Pegaspargase | Antineoplastic Agents | |
| Interferon beta-1a | Antineoplastic Agents | CA1341604 |
| Pegademase bovine | Enzyme Replacement Agents | |
| Human Serum Albumin | Serum substitutes | US6723303 |
| Eptifibatide | Platelet Aggregation Inhibitors | US6706681 |
| Serum albumin iodo ted | Diagnostic Agents | |
| Infliximab | Antirheumatic Agents, Anti- | CA2106299 |
| | Inflammatory Agents, Non- | |
| | Steroidal, Dermatologic Agents, | |
| | Gastrointesti 1 Agents and | |
| | Immunosuppressive Agents | |
| Follitropin beta | Fertility Agents | US7741268 |
| Vasopressin | Antidiuretic Agents | |
| Interferon beta-1b | Adjuvants, Immunologic and | CA1340861 |
| | Immunosuppressive Agents | |
| Interferon alphacon-1 | Antiviral Agents and | CA1341567 |
| | Immunosuppressive Agents | |
| Hyaluronidase | Adjuvants, Anesthesia and | |
| | Permeabilizing Agents | |
| Insulin, porcine | Hypoglycemic Agents | |
| Trastuzumab | Antineoplastic Agents | CA2103059 |
| Rituximab | Antineoplastic Agents, | CA2149329 |
| | Immunologic Factors and | |
| | Antirheumatic Agents | |
| Basiliximab | Immunosuppressive Agents | CA2038279 |
| Muromo b | Immunologic Factors and | |
| | Immunosuppressive Agents | |
| Digoxin Immune Fab | Antidotes | |
| (Ovine) | | |
| Ibritumomab | | CA2149329 |
| Daptomycin | | US6468967 |
| Tositumomab | | |
| Pegvisomant | Hormone Replacement Agents | US5849535 |
| Botulinum Toxin Type A | Neuromuscular Blocking Agents, | CA2280565 |
| | Anti-Wrinkle Agents and | |
| | Antidystonic Agents | |
| Pancrelipase | Gastrointesti 1 Agents and Enzyme | |
| | Replacement Agents | |
| Streptoki se | Fibrinolytic Agents and | |
| | Thrombolytic Agents | |
| Alemtuzumab | | CA1339198 |
| Alglucerase | Enzyme Replacement Agents | |
| Capromab | Indicators, Reagents and | |
| | Diagnostic Agents | |
| Laronidase | Enzyme Replacement Agents | |
| Urofollitropin | Fertility Agents | US5767067 |
| Efalizumab | Immunosuppressive Agents | |
| Serum albumin | Serum substitutes | US6723303 |
| Choriogo dotropin alpha | Fertility Agents and Go dotropins | US6706681 |
| Antithymocyte globulin | Immunologic Factors and | |
| | Immunosuppressive Agents | |
| Filgrastim | Immunosuppressive Agents, | CA1341537 |
| | Antineutropenic Agents and | |
| | Hematopoietic Agents | |
| Coagulation factor ix | Coagulants and Thrombotic | |
| | Agents | |
| Becaplermin | Angiogenesis Inducing Agents | CA1340846 |
| Agalsidase beta | Enzyme Replacement Agents | CA2265464 |
| Interferon alpha-2b | Immunosuppressive Agents | CA1341567 |
| Oxytocin | Oxytocics, Anti-tocolytic Agents | |
| | and Labor Induction Agents | |
| Enfuvirtide | HIV Fusion Inhibitors | US6475491 |
| Palivizumab | Antiviral Agents | CA2197684 |
| Daclizumab | Immunosuppressive Agents | |
| Bevacizumab | Angiogenesis Inhibitors | CA2286330 |
| Arcitumomab | Diagnostic Agents | US8420081 |
| Arcitumomab | Diagnostic Agents | US7790142 |
| Eculizumab | | CA2189015 |
| Panitumumab | | |
| Ranibizumab | Ophthalmics | CA2286330 |
| Idursulfase | Enzyme Replacement Agents | |
| Alglucosidase alpha | Enzyme Replacement Agents | CA2416492 |
| Exe tide | Hypoglycemic Agents | US6872700 |
| Mecasermin | | US5681814 |
| Pramlintide | | US5686411 |
| Galsulfase | Enzyme Replacement Agents | |
| Abatacept | Antirheumatic Agents and | CA2110518 |
| | Immunosuppressive Agents | |
| Cosyntropin | Hormones and Diagnostic Agents | |
| Corticotropin | | |
| Insulin aspart | Hypoglycemic Agents and | US5866538 |
| | Antidiabetic Agents | |
| Insulin detemir | Antidiabetic Agents | US5750497 |
| Insulin glulisine | Antidiabetic Agents | US6960561 |
| Pegaptanib | Intended for the prevention of | |
| | respiratory distress syndrome | |
| | (RDS) in premature infants at high | |
| | risk for RDS. | |
| Nesiritide | | |
| Thymalphasin | | |
| Defibrotide | Antithrombins | |
| tural alpha interferon OR | | |
| multiferon | | |
| Glatiramer acetate | | |
| Preotact | | |
| Teicoplanin | Anti-Bacterial Agents | |
| Ca kinumab | Anti-Inflammatory Agents and | |
| | Monoclo 1 antibodies | |
| Ipilimumab | Antineoplastic Agents and | CA2381770 |
| | Monoclo 1 antibodies | |
| Sulodexide | Antithrombins and Fibrinolytic | |
| | Agents and Hypoglycemic Agents | |
| | and Anticoagulants and | |
| | Hypolipidemic Agents | |
| Tocilizumab | | CA2201781 |
| Teriparatide | Bone Density Conservation | US6977077 |
| | Agents | |
| Pertuzumab | Monoclo 1 antibodies | CA2376596 |
| Rilo cept | Immunosuppressive Agents | US5844099 |
| Denosumab | Bone Density Conservation | CA2257247 |
| | Agents and Monoclo 1 antibodies | |
| Liraglutide | | US6268343 |
| Golimumab | Antipsoriatic Agents and Monoclo | |
| | 1 antibodies and TNF inhibitor | |
| Belatacept | Antirheumatic Agents and | |
| | Immunosuppressive Agents | |
| Buserelin | | |
| Velaglucerase alpha | Enzymes | US7138262 |
| Tesamorelin | | US5861379 |
| Brentuximab vedotin | | |
| Taliglucerase alpha | Enzymes | |
| Belimumab | Monoclo 1 antibodies | |
| Aflibercept | Antineoplastic Agents and | US7306799 |
| | Ophthalmics | |
| Asparagi se erwinia | Enzymes | |
| chrysanthemi | | |
| Ocriplasmin | Ophthalmics | |
| Glucarpidase | Enzymes | |
| Teduglutide | | US5789379 |
| Raxibacumab | Anti-Infective Agents and | |
| | Monoclo 1 antibodies | |
| Certolizumab pegol | TNF inhibitor | CA2380298 |
| Insulin, isophane | Hypoglycemic Agents and | |
| | Antidiabetic Agents | |
| Epoetin zeta | | |
| Obinutuzumab | Antineoplastic Agents | |
| Fibrinolysin aka plasmin | | US3234106 |
| Follitropin alpha | | |
| Romiplostim | Colony-Stimulating Factors and | |
| | Thrombopoietic Agents | |
| Luci ctant | Pulmo ry surfactants | US5407914 |
| talizumab | Immunosuppressive agents | |
| Aliskiren | Renin inhibitor | |
| Ragweed Pollen Extract | | |
| Secukinumab | Inhibitor | US20130202610 |
| Somatotropin Recombi nt | Hormone Replacement Agents | CA1326439 |
| Drotrecogin alpha | Antisepsis | CA2036894 |
| Alefacept | Dermatologic and | |
| | Immunosupressive agents | |
| OspA lipoprotein | Vaccines | |
| Uroki se | | US4258030 |
| Abarelix | Anti-Testosterone Agents | US5968895 |
| Sermorelin | Hormone Replacement Agents | |
| Aprotinin | | US5198534 |
| Gemtuzumab ozogamicin | Antineoplastic agents and | US5585089 |
| | Immunotoxins | |
| Satumomab Pendetide | Diagnostic Agents | |
| Albiglutide | Drugs used in diabetes; alimentary | |
| | tract and metabolism; blood | |
| | glucose lowering drugs, excl. | |
| | insulins. | |
| Alirocumab | | |
| Ancestim | | |
| Antithrombin alpha | | |
| Antithrombin III human | | |
| Asfotase alpha | Enzymes Alimentary Tract and | |
| | Metabolism | |
| Atezolizumab | | |
| Autologous cultured | | |
| chondrocytes | | |
| Beractant | | |
| Bli tumomab | Antineoplastic Agents | US20120328618 |
| | Immunosuppressive Agents | |
| | Monoclo 1 antibodies | |
| | Antineoplastic and | |
| | Immunomodulating Agents | |
| C1 Esterase Inhibitor | | |
| (Human) | | |
| Coagulation Factor XIII A- | | |
| Subunit (Recombi nt) | | |
| Conestat alpha | | |
| Daratumumab | Antineoplastic Agents | |
| Desirudin | | |
| Dulaglutide | Hypoglycemic Agents; Drugs | |
| | Used in Diabetes; Alimentary | |
| | Tract and Metabolism; Blood | |
| | Glucose Lowering Drugs, Excl. | |
| | Insulins | |
| Elosulfase alpha | Enzymes; Alimentary Tract and | |
| | Metabolism | |
| Elotuzumab | | US2014055370 |
| Evolocumab | Lipid Modifying Agents, Plain; | |
| | Cardiovascular System | |
| Fibrinogen Concentrate | | |
| (Human) | | |
| Filgrastim-sndz | | |
| Gastric intrinsic factor | | |
| Hepatitis B immune | | |
| globulin | | |
| Human calcitonin | | |
| Human Clostridium tetani | | |
| toxoid immune globulin | | |
| Human rabies virus | | |
| immune globulin | | |
| Human Rho(D) immune | | |
| globulin | | |
| Hyaluronidase (Human | | US7767429 |
| Recombi nt) | | |
| Idarucizumab | Anticoagulant | |
| Immune Globulin Human | Immunologic Factors; | |
| | Immunosuppressive Agents; Anti- | |
| | Infective Agents | |
| Vedolizumab | Immunosupressive agent, | US2012151248 |
| | Antineoplastic agent | |
| Ustekinumab | Deramtologic agent, | |
| | Immunosuppressive agent, | |
| | antineoplastic agent | |
| Turoctocog alpha | | |
| Tuberculin Purified Protein | | |
| Derivative | | |
| Simoctocog alpha | Antihaemorrhagics: blood | |
| | coagulation factor VIII | |
| Siltuximab | Antineoplastic and | US7612182 |
| | Immunomodulating Agents, | |
| | Immunosuppressive Agents | |
| Sebelipase alpha | Enzymes | |
| Sacrosidase | Enzymes | |
| Ramucirumab | Antineoplastic and | US2013067098 |
| | Immunomodulating Agents | |
| Prothrombin complex | | |
| concentrate | | |
| Poractant alpha | Pulmo ry Surfactants | |
| Pembrolizumab | Antineoplastic and | US2012135408 |
| | Immunomodulating Agents | |
| Peginterferon beta-1a | | |
| Ofatumumab | Antineoplastic and | US8337847 |
| | Immunomodulating Agents | |
| Obiltoxaximab | | |
| Nivolumab | Antineoplastic and | US2013173223 |
| | Immunomodulating Agents | |
| Necitumumab | | |
| Metreleptin | | US20070099836 |
| Methoxy polyethylene | | |
| glycol-epoetin beta | | |
| Mepolizumab | Antineoplastic and | US2008134721 |
| | Immunomodulating Agents, | |
| | Immunosuppressive Agents, | |
| | Interleukin Inhibitors | |
| Ixekizumab | | |
| Insulin Pork | Hypoglycemic Agents, | |
| | Antidiabetic Agents | |
| Insulin Degludec | | |
| Insulin Beef | | |
| Thyroglobulin | Hormone therapy | US5099001 |
| Anthrax immune globulin | Plasma derivative | |
| human | | |
| Anti-inhibitor coagulant | Blood Coagulation Factors, | |
| complex | Antihemophilic Agent | |
| Anti-thymocyte Globulin | Antibody | |
| (Equine) | | |
| Anti-thymocyte Globulin | Antibody | |
| (Rabbit) | | |
| Brodalumab | Antineoplastic and | |
| | Immunomodulating Agents | |
| C1 Esterase Inhibitor | Blood and Blood Forming Organs | |
| (Recombi nt) | | |
| Ca kinumab | Antineoplastic and | |
| | Immunomodulating Agents | |
| Chorionic Go dotropin | Hormones | US6706681 |
| (Human) | | |
| Chorionic Go dotropin | Hormones | US5767251 |
| (Recombi nt) | | |
| Coagulation factor X | Blood Coagulation Factors | |
| human | | |
| Dinutuximab | Antibody, Immunosuppresive | US20140170155 |
| | agent, Antineoplastic agent | |
| Efmoroctocog alpha | Antihemophilic Factor | |
| Factor IX Complex | Antihemophilic agent | |
| (Human) | | |
| Hepatitis A Vaccine | Vaccine | |
| Human Varicella-Zoster | Antibody | |
| Immune Globulin | | |
| Ibritumomab tiuxetan | Antibody, Immunosuppressive | CA2149329 |
| | Agents | |
| Lenograstim | Antineoplastic and | |
| | Immunomodulating Agents | |
| Pegloticase | Enzymes | |
| Protamine sulfate | Heparin Antagonists, Hematologic | |
| | Agents | |
| Protein S human | Anticoagulant plasma protein | |
| Sipuleucel-T | Antineoplastic and | US8153120 |
| | Immunomodulating Agents | |
| Somatropin recombi nt | Hormones, Hormone Substitutes, | CA1326439, CA2252535, |
| | and Hormone Antagonists | US5288703, US5849700, |
| | | US5849704, US5898030, |
| | | US6004297, US6152897, |
| | | US6235004, US6899699 |
| Susoctocog alpha | Blood coagulation factors, | |
| | Antihaemorrhagics | |
| Thrombomodulin alpha | Anticoagulant agent, Antiplatelet | |
| | agent | |

TABLE 9
Exemplary monoclonal antibody therapies.

| mAb | Target | Indication |
|---|---|---|
| Muromonab-CD3 | CD3 | Kidney transplant rejection |
| Abeiximab | GPIIb/IIIa | Prevention of blood clots in angioplasty |
| Rituximab | CD20 | Non-Hodgkin lymphoma |
| Palivizumab | RSV | Prevention of respiratory syncytial virus |
| | | infection |
| Infliximab | TNFα | Crohn's disease |
| Trastuzumab | HER2 | Breast cancer |
| Alemtuzumab | CD52 | Chronic myeloid leukemia |
| Adalimumab | TNFα | Rheumatoid arthritis |
| Ibritumomab | CD20 | Non-Hodgkin lymphoma |
| tiuxetan | | |
| Omalizumab | IgE | Asthma |
| Cetuximab | EGFR | Colorectal cancer |
| Bevacizumab | VEGF-A | Colorectal cancer |
| Natalizumab | ITGA4 | Multiple sclerosis |
| Panitumumab | EGFR | Colorectal cancer |
| Ranibizumab | VEGF-A | Macular degeneration |
| Eculizumab | C5 | Paroxysmal nocturnal hemoglobinuria |
| Certolizumab | TNFα | Crohn's disease |
| pegol | | |
| Ustekinumab | IL-12/23 | Psoriasis |
| Canakinumab | IL-1β | Muckle-Wells syndrome |
| Golimumab | TNFα | Rheumatoid and psoriatic arthritis, ankylosing |
| | | spondylitis |
| Ofatumumab | CD20 | Chronic lymphocytic leukemia |
| Tocilizumab | IL-6R | Rheumatoid arthritis |
| Denosumab | RANKL | Bone loss |
| Belimumab | BLyS | Systemic lupus erythematosus |
| Ipilimumab | CTLA-4 | Metastatic melanoma |
| Brentuximab | CD30 | Hodgkin lymphoma, systemic anaplastic large |
| vedotin | | cell lymphoma |
| Pertuzumab | HER2 | Breast Cancer |
| Trastuzumab | HER2 | Breast cancer |
| emtansine | | |
| Raxibacumab | B. anthrasis PA | Anthrax infection |
| Obinutuzumab | CD20 | Chronic lymphocytic leukemia |
| Siltuximab | IL-6 | Castleman disease |
| Ramucirumab | VEGFR2 | Gastric cancer |
| Vedolizumab | α4β7 integrin | Ulcerative colitis, Crohn disease |
| Blinatumomab | CD19, CD3 | Acute lymphoblastic leukemia |
| Nivolumab | PD-1 | Melanoma, non-small cell lung cancer |
| Pembrolizumab | PD-1 | Melanoma |
| Idarucizumab | Dabigatran | Reversal of dabigatran-induced anticoagulation |
| Necitumumab | EGFR | Non-small cell lung cancer |
| Dinutuximab | GD2 | Neuroblastoma |
| Secukinumab | IL-17α | Psoriasis |
| Mepolizumab | IL-5 | Severe eosinophilic asthma |
| Alirocumab | PCSK9 | High cholesterol |
| Evolocumab | PCSK9 | High cholesterol |
| Daratumumab | CD38 | Multiple myeloma |
| Elotuzumab | SLAMF7 | Multiple myeloma |
| Ixekizumab | IL-17α | Psoriasis |
| Reslizumab | IL-5 | Asthma |
| Olaratumab | PDGFRα | Soft tissue sarcoma |
| Bezlotoxumab | Clostridium | Prevention of Clostridium difficile infection |
| | difficile enterotoxin B | recurrence |
| Atezolizumab | PD-L1 | Bladder cancer |
| Obiltoxaximab | B. anthrasis PA | Prevention of inhalational anthrax |
| Inotuzumab | CD22 | Acute lymphoblastic leukemia |
| ozogamicin | | |
| Brodalumab | IL-17R | Plaque psoriasis |
| Guselkumab | IL-23 p19 | Plaque psoriasis |
| Dupilumab | IL-4Rα | Atopic dermatitis |
| Sarilumab | IL-6R | Rheumatoid arthritis |
| Avelumab | PD-L1 | Merkel cell carcinoma |
| Ocrelizumab | CD20 | Multiple sclerosis |
| Emicizumab | Factor IXa, X | Hemophilia A |
| Benralizumab | IL-5Rα | Asthma |
| Gemtuzumab | CD33 | Acute myeloid leukemia |
| ozogamicin | | |
| Durvalumab | PD-L1 | Bladder cancer |
| Burosumab | FGF23 | X-linked hypophosphatemia |
| Lanadelumab | Plasma kallikrein | Hereditary angioedema attacks |
| Mogamulizumab | CCR4 | Mycosis fungoides or Sézary syndrome |
| Erenumab | CGRPR | Migraine prevention |
| Galcanezumab | CGRP | Migraine prevention |
| Tildrakizumab | IL-23 p19 | Plaque psoriasis |
| Cemiplimab | PD-1 | Cutaneous squamous cell carcinoma |
| Emapalumab | IFNγ | Primary hemophagocytic lymphohistiocytosis |
| Fremanezumab | CGRP | Migraine prevention |
| Ibalizumab | CD4 | HIV infection |
| Moxetumomab | CD22 | Hairy cell leukemia |
| pasudodox | | |
| Ravulizumab | C5 | Paroxysmal nocturnal hemoglobinuria |
| Caplacizumab | von Willebrand factor | Acquired thrombotic thrombocytopenic purpura |
| Romosozumab | Selerostin | Osteoporosis in postmenopausal women at |
| | | increased risk of fracture |
| Risankizumab | IL-23 p19 | Plaque psoriasis |
| Polatuzumab | CD79β | Diffuse large B-cell lymphoma |
| vedotin | | |
| Brolucizumab | VEGF-A | Macular degeneration |
| Crizanlizumab | P-selectin | Sickle cell disease |

### Applications

[0273] By integrating coding genes into a DNA sequence template, the Gene Writer system can address therapeutic needs, for example, by providing expression of a therapeutic transgene (e.g., comprised in an object sequence as described herein) in individuals with loss-of-function mutations, by replacing gain-of-function mutations with normal transgenes, by providing regulatory sequences to eliminate gain-of-function mutation expression, and/or by controlling the expression of operably linked genes, transgenes and systems thereof. In certain embodiments, an object sequence (e.g., a heterologous object sequence) comprises a coding sequence encoding a functional element (e.g., a polypeptide or non-coding RNA, e.g., as described herein) specific to the therapeutic needs of the host cell. In some embodiments, an object sequence (e.g., a heterologous object sequence) comprises a promoter, for example, a tissue specific promotor or enhancer. In some embodiments, a promotor can be operably linked to a coding sequence.

[0274] In embodiments, the Gene Writer™ gene editor system can provide an object sequence comprising, e.g., a therapeutic agent (e.g., a therapeutic transgene) expressing, e.g., replacement blood factors or replacement enzymes, e.g., lysosomal enzymes. For example, the compositions, systems and methods described herein are useful to express, in a target human genome, agalsidase alpha or beta for treatment of Fabry Disease; imiglucerase, taliglucerase alfa, velaglucerase alfa, or alglucerase for Gaucher Disease; sebelipase alpha for lysosomal acid lipase deficiency (Wolman disease/CESD); laronidase, idursulfase, elosulfase alpha, or galsulfase for mucopolysaccharidoses; alglucosidase alpha for Pompe disease. For example, the compositions, systems and methods described herein are useful to express, in a target human genome factor I, II, V, VII, X, XI, XII or XIII for blood factor deficiencies.

### Administration

[0275] The composition and systems described herein may be used in vitro or in vivo. In some embodiments the system or components of the system are delivered to cells (e.g., mammalian cells, e.g., human cells), e.g., in vitro or in vivo. The skilled artisan will understand that the components of the Gene Writer system may be delivered in the form of polypeptide, nucleic acid (e.g., DNA, RNA), and combinations thereof.

[0276] In some embodiments, the system and/or components of the system are delivered as nucleic acids. For example, the recombinase polypeptide may be delivered in the form of a DNA or RNA encoding the recombinase polypeptide. In some embodiments the system or components of the system (e.g., an insert DNA and a recombinase polypeptide-encoding nucleic acid molecule) are delivered on 1, 2, 3, 4, or more distinct nucleic acid molecules. In some embodiments the system or components of the system are delivered as a combination of DNA and RNA. In some embodiments the system or components of the system are delivered as a combination of DNA and protein. In some embodiments the system or components of the system are delivered as a combination of RNA and protein. In some embodiments the recombinase polypeptide is delivered as a protein.

[0277] In some embodiments the system or components of the system are delivered to cells, e.g. mammalian cells or human cells, using a vector. The vector may be, e.g., a plasmid or a virus. In some embodiments delivery is in vivo, in vitro, ex vivo, or in situ. In some embodiments the virus is an adeno associated virus (AAV), a lentivirus, an adenovirus. In some embodiments the system or components of the system are delivered to cells with a viral-like particle or a virosome. In some embodiments the delivery uses more than one virus, viral-like particle or virosome.

[0278] In one embodiment, the compositions and systems described herein can be formulated in liposomes or other similar vesicles. Liposomes are spherical vesicle structures composed of a uni- or multilamellar lipid bilayer surrounding internal aqueous compartments and a relatively impermeable outer lipophilic phospholipid bilayer. Liposomes may be anionic, neutral or cationic. Liposomes are biocompatible, nontoxic, can deliver both hydrophilic and lipophilic drug molecules, protect their cargo from degradation by plasma enzymes, and transport their load across biological membranes and the blood brain barrier (BBB) (see, e.g., Spuch and Navarro, Journal of Drug Delivery, vol. 2011, Article ID 469679, 12 pages, 2011. doi:10.1155/2011/469679 for review).

[0279] Vesicles can be made from several different types of lipids; however, phospholipids are most commonly used to generate liposomes as drug carriers. Methods for preparation of multilamellar vesicle lipids are known in the art (see for example U.S. Pat. No. 6,693,086, the teachings of which relating to multilamellar vesicle lipid preparation are incorporated herein by reference). Although vesicle formation can be spontaneous when a lipid film is mixed with an aqueous solution, it can also be expedited by applying force in the form of shaking by using a homogenizer, sonicator, or an extrusion apparatus (see, e.g., Spuch and Navarro, Journal of Drug Delivery, vol. 2011, Article ID 469679, 12 pages, 2011. doi:10.1155/2011/469679 for review). Extruded lipids can be prepared by extruding through filters of decreasing size, as described in Templeton et al., Nature Biotech, 15:647-652, 1997, the teachings of which relating to extruded lipid preparation are incorporated herein by reference.

[0280] Lipid nanoparticles are another example of a carrier that provides a biocompatible and biodegradable delivery system for the pharmaceutical compositions described herein. Nanostructured lipid carriers (NLCs) are modified solid lipid nanoparticles (SLNs) that retain the characteristics of the SLN, improve drug stability and loading capacity, and prevent drug leakage. Polymer nanoparticles (PNPs) are an important component of drug delivery. These nanoparticles can effectively direct drug delivery to specific targets and improve drug stability and controlled drug release. Lipid-polymer nanoparticles (PLNs), a new type of carrier that combines liposomes and polymers, may also be employed. These nanoparticles possess the complementary advantages of PNPs and liposomes. A PLN is composed of a core-shell structure; the polymer core provides a stable structure, and the phospholipid shell offers good biocompatibility. As such, the two components increase the drug encapsulation efficiency rate, facilitate surface modification, and prevent leakage of water-soluble drugs. For a review, see, e.g., Li et al. 2017, Nanomaterials 7, 122; doi:10.3390/nano7060122.

[0281] Exosomes can also be used as drug delivery vehicles for the compositions and systems described herein. For a review, see Ha et al. July 2016. Acta Pharmaceutica Sinica B. Volume 6, Issue 4, Pages 287-296; https://doi.org/10.1016/j.apsb.2016.02.001.

[0282] In some embodiments, at least one component of a system described herein comprises a fusosome. Fusosomes interact and fuse with target cells, and thus can be used as delivery vehicles for a variety of molecules. They generally consist of a bilayer of amphipathic lipids enclosing a lumen or cavity and a fusogen that interacts with the amphipathic lipid bilayer. The fusogen component has been shown to be engineerable in order to confer target cell specificity for the fusion and payload delivery, allowing the creation of delivery vehicles with programmable cell specificity (see, for example, the sections relating to fusosome design, preparation, and usage in PCT Publication No. WO/2020014209, incorporated herein by reference in its entirety).

[0283] A Gene Writer system can be introduced into cells, tissues and multicellular organisms. In some embodiments the system or components of the system are delivered to the cells via mechanical means or physical means.

[0284] Formulation of protein therapeutics is described in Meyer (Ed.), Therapeutic Protein Drug Products: Practical Approaches to formulation in the Laboratory, Manufacturing, and the Clinic, Woodhead Publishing Series (2012).

[0285] In some embodiments, a Gene Writer™ system described herein is delivered to a tissue or cell from the cerebrum, cerebellum, adrenal gland, ovary, pancreas, parathyroid gland, hypophysis, testis, thyroid gland, breast, spleen, tonsil, thymus, lymph node, bone marrow, lung, cardiac muscle, esophagus, stomach, small intestine, colon, liver, salivary gland, kidney, prostate, blood, or other cell or tissue type. In some embodiments, a Gene Writer™ system described herein is used to treat a disease, such as a cancer, inflammatory disease, infectious disease, genetic defect, or other disease. A cancer can be cancer of the cerebrum, cerebellum, adrenal gland, ovary, pancreas, parathyroid gland, hypophysis, testis, thyroid gland, breast, spleen, tonsil, thymus, lymph node, bone marrow, lung, cardiac muscle, esophagus, stomach, small intestine, colon, liver, salivary gland, kidney, prostate, blood, or other cell or tissue type, and can include multiple cancers.

[0286] In some embodiments, a Gene Writer™ system described herein described herein is administered by enteral administration (e.g. oral, rectal, gastrointestinal, sublingual, sublabial, or buccal administration). In some embodiments, a Gene Writer™ system described herein is administered by parenteral administration (e.g., intravenous, intramuscular, subcutaneous, intradermal, epidural, intracerebral, intracerebroventricular, epicutaneous, nasal, intra-arterial, intra-articular, intracavernous, intraocular, intraosseous infusion, intraperitoneal, intrathecal, intrauterine, intravaginal, intravesical, perivascular, or transmucosal administration). In some embodiments, a Gene Writer™ system described herein is administered by topical administration (e.g., transdermal administration).

[0287] In some embodiments, a Gene Writer™ system as described herein can be used to modify an animal cell, plant cell, or fungal cell. In some embodiments, a Gene Writer™ system as described herein can be used to modify a mammalian cell (e.g., a human cell). In some embodiments, a Gene Writer™ system as described herein can be used to modify a cell from a livestock animal (e.g., a cow, horse, sheep, goat, pig, llama, alpaca, camel, yak, chicken, duck, goose, or ostrich). In some embodiments, a Gene Writer™ system as described herein can be used as a laboratory tool or a research tool, or used in a laboratory method or research method, e.g., to modify an animal cell, e.g., a mammalian cell (e.g., a human cell), a plant cell, or a fungal cell.

[0288] In some embodiments, a Gene Writer™ system as described herein can be used to express a protein, template, or heterologous object sequence (e.g., in an animal cell, e.g., a mammalian cell (e.g., a human cell), a plant cell, or a fungal cell). In some embodiments, a Gene Writer™ system as described herein can be used to express a protein, template, or heterologous object sequence under the control of an inducible promoter (e.g., a small molecule inducible promoter). In some embodiments, a Gene Writing system or payload thereof is designed for tunable control, e.g., by the use of an inducible promoter. For example, a promoter, e.g., Tet, driving a gene of interest may be silent at integration, but may, in some instances, activated upon exposure to a small molecule inducer, e.g., doxycycline. In some embodiments, the tunable expression allows post-treatment control of a gene (e.g., a therapeutic gene), e.g., permitting a small molecule-dependent dosing effect. In embodiments, the small molecule-dependent dosing effect comprises altering levels of the gene product temporally and/or spatially, e.g., by local administration. In some embodiments, a promoter used in a system described herein may be inducible, e.g., responsive to an endogenous molecule of the host and/or an exogenous small molecule administered thereto.

### Treatment of Suitable Indications

[0289] In some embodiments, a Gene Writer™ system described herein, or a component or portion thereof (e.g., a polypeptide or nucleic acid as described herein), is used to treat a disease, disorder, or condition. In some embodiments, the Gene Writer™ system described herein, or component or portion thereof, is used to treat a disease, disorder, or condition listed in any of Tables 10-15. In some embodiments, the Gene Writer™ system described herein, or component or portion thereof, is used to treat a hematopoietic stem cell (HSC) disease, disorder, or condition, e.g., as listed in Table 10. In some embodiments, the Gene Writer™ system described herein, or component or portion thereof, is used to treat a kidney disease, disorder, or condition, e.g., as listed in Table 11. In some embodiments, the Gene Writer™ system described herein, or component or portion thereof, is used to treat a liver disease, disorder, or condition, e.g., as listed in Table 12. In some embodiments, the Gene Writer™ system described herein, or component or portion thereof, is used to treat a lung disease, disorder, or condition, e.g., as listed in Table 13. In some embodiments, the Gene Writer™ system described herein, or component or portion thereof, is used to treat a skeletal muscle disease, disorder, or condition, e.g., as listed in Table 14. In some embodiments, the Gene Writer™ system described herein, or component or portion thereof, is used to treat a skin disease, disorder, or condition, e.g., as listed in Table 15.

[0290] Tables 10-15: Indications Selected for Trans Gene Writers to be Used for Recombinases

TABLE 10
HSCs

| Disease | Gene Affected |
|---|---|
| Adrenoleukodystrophy (CALD) | ABCD1 |
| Alpha-mannosidosis | MAN2B1 |
| Fanconi anemia | FANCA; FANCC; FANCG |
| Gaucher disease | GBA |
| Globoid cell leukodystrophy (Krabbe disease) | GALC |
| Hemophagocytic lymphohistiocytosis | PRF1; STX11; STXBP2; UNC13D |
| Malignant infantile osteopetrosis-autosomal | TCIRG1; Many genes implicated |
| recessive osteopetrosis | |
| Metachromatic leukodystrophy | ARSA; PSAP |
| MPS 1S (Scheie syndrome) | IDUA |
| MPS2 | IDS |
| MPS7 | GUSB |
| Mucolipidosis II | GNPTAB |
| Niemann-Pick disease A and B | SMPD1 |
| Niemann-Pick disease C | NPC1 |
| Pompe disease | GAA |
| Sickle cell disease (SCD) | HBB |
| Tay Sachs | HEXA |
| Thalassemia | HBB |

TABLE 11
Kidney

| Disease | Gene Affected |
|---|---|
| Congenital nephrotic syndrome | NPHS2 |
| Cystinosis | CTNS |

TABLE 12
Liver

| Disease | Gene Affected |
|---|---|
| Acute intermittent porphyria | HMBS |
| Alagille syndrome | JAG1 |
| Carbamoyl phosphate synthetase I deficiency | CPS1 |
| Citrullinemia I | ASS1 |
| Crigler-Najjar | UGT1A1 |
| Fabry | LPL |
| Familial chylomicronemia syndrome | GLA |
| Gaucher | GBE1 |
| GSD IV | GBA |
| Heme A | F8 |
| Heme B | F9 |
| HoFH | LDLRAP1 |
| Methylmalonic acidemia | Type Ia: BCKDHA |
| | Type Ib: BCKDHB |
| | Type II: DBT |
| MPS II | MMUT |
| MPS III | IDS |
| MPS IV | Type IIIa: SGSH |
| | Type IIIb: NAGLU |
| | Type IIIc: HGSNAT |
| | Type IIId: GNS |
| MPS VI | Type IVA: GALNS |
| | Type IVB: GLB1 |
| MSUD | ARSB |
| OTC Deficiency | OTC |
| Polycystic Liver Disease | PRKCSH |
| Pompe | GAA |
| Primary Hyperoxaluria 1 | AGXT (HAO1 or LDHA for CRISPR) |
| Progressive familial intrahepatic cholestasis type 1 | ATP8B1 |
| Progressive familial intrahepatic cholestasis type 2 | ABCB11 |
| Progressive familial intrahepatic cholestasis type 3 | ABCB4 |
| Propionic acidemia | PCCB; PCCA |
| Wilson's Disease | ATP7B |

TABLE 13
Lung

| Disease | Gene Affected |
|---|---|
| Alpha-1 antitrypsin deficiency | SERPINA1 |
| Cystic fibrosis | CFTR |
| Primary ciliary dyskinesia | DNAI1 |
| Primary ciliary dyskinesia | DNAH5 |
| Primary pulmonary hypertension I | BMPR2 |
| Surfactant Protein B (SP-B) Deficiency | SFTPB |
| (pulmonary surfactant metabolism dysfunction 1) | |

TABLE 14
Skeletal muscle

| Disease | Gene Affected |
|---|---|
| Becker muscular dystrophy | DMD |
| Becker myotonia | CLCN1 |
| Bethlem myopathy | COL6A2 |
| Centronuclear myopathy, X-linked (motubular) | MTM1 |
| Congenital myasthenic syndrome | CHRNE |
| Duchenne muscular dystrophy | DMD |
| Emery-Dreifuss muscular dystrophy, AD | LMNA |
| Limb-girdle muscular dystrophy 2A | CAPN3 |
| Limb-girdle muscular dystrophy, type 2D | SGCA |

TABLE 15
Skin

| Disease | Gene Affected |
|---|---|
| Epidermolysis Bullosa Dystrophica Recessive | COL7A1 |
| (Hallopeau-Siemens) | |
| Epidermolysis Bullosa Junctional | LAMB3 |
| Epidermolytic Ichthyosis | KRT1; KRT10 |
| Hailey-Hailey Disease | ATP2C1 |
| Lamellar Ichthyosis/Nonbullous Congenital | TGM1 |
| Ichthyosiform Erythroderma (ARCI) | |
| Netherton Syndrome | SPINK5 |

[0291] In some embodiments, a Gene Writer™ system described herein, or a component or portion thereof (e.g., a polypeptide or nucleic acid as described herein), is used to treat a genetic disease, disorder, or condition. In some embodiments, a Gene Writer™ system described herein, or a component or portion thereof (e.g., a polypeptide or nucleic acid as described herein), is used to treat a subject (e.g., a human patient) diagnosed with a genetic disease, disorder, or condition. In some embodiments, the genetic disease, disorder, or condition is associated with a specific genotype, e.g., a heterozygous or homozygous genotype. In some embodiments, the genetic disease, disorder, or condition is associated with a specific mutation, e.g., substitution, deletion, or insertion, e.g., a nucleotide expansion. In some embodiments, the genetic disease, disorder, or condition is cystic fibrosis or ornithine transcarbamylase (OTC) deficiency. In some embodiments, a Gene Writer™ system described herein for use in treating a genetic disease, disorder, or condition comprises a heterologous object sequence comprising a functional (e.g., wildtype) copy of a gene for which the subject (e.g., human patient) is deficient (e.g., wholly or in a target population of cells). In some embodiments, the functional copy of a gene comprises a functional (e.g., wildtype) CFTR gene or OTC gene.

[0292] In some embodiments, a Gene Writer™ system described herein, or a component or portion thereof (e.g., a polypeptide or nucleic acid as described herein), is used to treat a subject (e.g., human patient) having a biomarker (e.g., associated with a disease, disorder, or condition, e.g., a genetic disease, disorder, or condition) at a level outside of a healthy range. In some embodiments, a Gene Writer™ system described herein, or a component or portion thereof (e.g., a polypeptide or nucleic acid as described herein), is used to treat a subject (e.g., a human patient) diagnosed as having a biomarker (e.g., associated with a disease, disorder, or condition, e.g., a genetic disease, disorder, or condition) at a level outside of a healthy range.

[0293] In some embodiments, the presence and/or level of the biomarker and/or the genotype of the subject (e.g., human patient) is determined before treatment using a Gene Writer™ system described herein, or a component or portion thereof (e.g., a polypeptide or nucleic acid as described herein). In some embodiments, the presence and/or level of the biomarker and/or the genotype of the subject (e.g., human patient) is determined after treatment using a Gene Writer™ system described herein, or a component or portion thereof (e.g., a polypeptide or nucleic acid as described herein). In some embodiments, the presence and/or level of the biomarker and/or the genotype of the subject (e.g., human patient) is determined before and after treatment using a Gene Writer™ system described herein, or a component or portion thereof (e.g., a polypeptide or nucleic acid as described herein).

[0294] In some embodiments, a Gene Writer™ system described herein, or a component or portion thereof (e.g., a polypeptide or nucleic acid as described herein) is administered responsive to a determination that a biomarker is present at a level outside of a normal and/or healthy range in a subject (e.g., a human patient). In some embodiments, a Gene Writer™ system described herein, or a component or portion thereof (e.g., a polypeptide or nucleic acid as described herein) is re-administered responsive to a determination that a biomarker is present at a level outside of a normal and/or healthy range in a subject (e.g., a human patient) after a first administration of the Gene Writer™ system described herein, or a component or portion thereof. In some embodiments, a Gene Writer™ system described herein, or a component or portion thereof (e.g., a polypeptide or nucleic acid as described herein) is administered responsive to a determination that a subject (e.g., a human patient), e.g., or a target cell population in the subject, has a genotype (e.g., associated with a disease, disorder, or condition). In some embodiments, a Gene Writer™ system described herein, or a component or portion thereof (e.g., a polypeptide or nucleic acid as described herein) is re-administered responsive to a determination that a subject (e.g., a human patient), e.g., or a target cell population in the subject, has a genotype (e.g., associated with a disease, disorder, or condition) after a first administration of the Gene Writer™ system described herein, or a component or portion thereof. In some embodiments, administration of a Gene Writer™ system described herein, or a component or portion thereof (e.g., a polypeptide or nucleic acid as described herein) continues or is repeated until a biomarker is present at a level within a normal and/or healthy range in the subject (e.g., a human patient). In some embodiments, administration of a Gene Writer™ system described herein, or a component or portion thereof (e.g., a polypeptide or nucleic acid as described herein) continues or is repeated until the subject (e.g., a human patient), e.g., or a target cell population in the subject, does not have the genotype (e.g., associated with a disease, disorder, or condition).

[0295] In some embodiments, a Gene Writer™ system described herein, or a component or portion thereof (e.g., a polypeptide or nucleic acid as described herein), is used to treat a disease, disorder, or condition prenatally (e.g., in a human subject in utero, e.g., an embryo or fetus). In some embodiments, a Gene Writer™ system described herein, or a component or portion thereof (e.g., a polypeptide or nucleic acid as described herein), is used to treat a disease, disorder, or condition postnatally, e.g., in a human infant, toddler, or child. In some embodiments, a Gene Writer™ system described herein, or a component or portion thereof (e.g., a polypeptide or nucleic acid as described herein), is used to treat a disease, disorder, or condition neonatally.

[0296] In some embodiments, the genotype of a subject (e.g., a human patient), e.g., or a target cell population in the subject, treated with a Gene Writer™ system described herein, or a component or portion thereof (e.g., a polypeptide or nucleic acid as described herein), remains stable as the subject develops. Stable in this context may refer to the absence of additional alterations in a subject's genotype (e.g., or a target cell population in the subject) after treatment with the Gene Writer™ system described herein, or a component or portion thereof (e.g., a polypeptide or nucleic acid as described herein) is complete. Stable in this context may additionally or alternatively refer to the persistence of an alteration to the subject's genotype made by a Gene Writer system described herein. Without wishing to be bound by theory, it may be desirable to avoid, prevent, or minimize additional alterations in the genotype of a subject besides those made by the Gene Writer system. Additionally or alternatively, it may be desirable that the alteration of the genotype of a subject (e.g., or a target cell population in the subject), persist after completion of treatment (e.g., for at least a selected time interval, e.g., indefinitely). In some embodiments, the genotype of a subject, e.g., or a target cell population in the subject, after the completion of treatment is the same as the genotype of the subject, e.g., or the target cell population in the subject, at a selected time interval after treatment, e.g., 1, 2, 3, 4, 5, 6, or 7 days, or 1, 2, 3, 4, 5, 6, 7, 8, 9, or 10 weeks, or 3, 4, 5, 6, 7, 8, 9, 10, or 11 months, or 1, 2, 3, 4, 5, 6, 7, 8, 9, or 10 years (e.g., indefinitely). In some embodiments, an alteration to the genotype of a subject, e.g., or a target cell population in the subject, made by the Gene Writer™ system described herein, or a component or portion thereof (e.g., a polypeptide or nucleic acid as described herein) persists for at least a selected time interval after treatment, e.g., 1, 2, 3, 4, 5, 6, or 7 days, or 1, 2, 3, 4, 5, 6, 7, 8, 9, or 10 weeks, or 3, 4, 5, 6, 7, 8, 9, 10, or 11 months, or 1, 2, 3, 4, 5, 6, 7, 8, 9, or 10 years (e.g., indefinitely).

### Plant-Modification Methods

[0297] Gene Writer systems described herein may be used to modify a plant or a plant part (e.g., leaves, roots, flowers, fruits, or seeds), e.g., to increase the fitness of a plant.

[0298] A. Delivery to a Plant

[0299] Provided herein are methods of delivering a Gene Writer system described herein to a plant. Included are methods for delivering a Gene Writer system to a plant by contacting the plant, or part thereof, with a Gene Writer system. The methods are useful for modifying the plant to, e.g., increase the fitness of a plant.

[0300] More specifically, in some embodiments, a nucleic acid described herein (e.g., a nucleic acid encoding a GeneWriter) may be encoded in a vector, e.g., inserted adjacent to a plant promoter, e.g., a maize ubiquitin promoter (ZmUBI) in a plant vector (e.g., pHUC411). In some embodiments, the nucleic acids described herein are introduced into a plant (e.g., japonica rice) or part of a plant (e.g., a callus of a plant) via agrobacteria. In some embodiments, the systems and methods described herein can be used in plants by replacing a plant gene (e.g., hygromycin phosphotransferase (HPT)) with a null allele (e.g., containing a base substitution at the start codon). Systems and methods for modifying a plant genome are described in Xu et. al. Development of plant prime-editing systems for precise genome editing, 2020, Plant Communications.

[0301] In one aspect, provided herein is a method of increasing the fitness of a plant, the method including delivering to the plant the Gene Writer system described herein (e.g., in an effective amount and duration) to increase the fitness of the plant relative to an untreated plant (e.g., a plant that has not been delivered the Gene Writer system).

[0302] An increase in the fitness of the plant as a consequence of delivery of a Gene Writer system can manifest in a number of ways, e.g., thereby resulting in a better production of the plant, for example, an improved yield, improved vigor of the plant or quality of the harvested product from the plant, an improvement in pre- or post-harvest traits deemed desirable for agriculture or horticulture (e.g., taste, appearance, shelf life), or for an improvement of traits that otherwise benefit humans (e.g., decreased allergen production). An improved yield of a plant relates to an increase in the yield of a product (e.g., as measured by plant biomass, grain, seed or fruit yield, protein content, carbohydrate or oil content or leaf area) of the plant by a measurable amount over the yield of the same product of the plant produced under the same conditions, but without the application of the instant compositions or compared with application of conventional plant-modifying agents. For example, yield can be increased by at least about 0.5%, about 1%, about 2%, about 3%, about 4%, about 5%, about 10%, about 20%, about 30%, about 40%, about 50%, about 60%, about 70%, about 80%, about 90%, about 100%, or more than 100%. In some instances, the method is effective to increase yield by about 2×-fold, 5×-fold, 10×-fold, 25×-fold, 50×-fold, 75×-fold, 100×-fold, or more than 100×-fold relative to an untreated plant. Yield can be expressed in terms of an amount by weight or volume of the plant or a product of the plant on some basis. The basis can be expressed in terms of time, growing area, weight of plants produced, or amount of a raw material used. For example, such methods may increase the yield of plant tissues including, but not limited to: seeds, fruits, kernels, bolls, tubers, roots, and leaves.

[0303] An increase in the fitness of a plant as a consequence of delivery of a Gene Writer system can also be measured by other means, such as an increase or improvement of the vigor rating, the stand (the number of plants per unit of area), plant height, stalk circumference, stalk length, leaf number, leaf size, plant canopy, visual appearance (such as greener leaf color), root rating, emergence, protein content, increased tillering, bigger leaves, more leaves, less dead basal leaves, stronger tillers, less fertilizer needed, less seeds needed, more productive tillers, earlier flowering, early grain or seed maturity, less plant verse (lodging), increased shoot growth, earlier germination, or any combination of these factors, by a measurable or noticeable amount over the same factor of the plant produced under the same conditions, but without the administration of the instant compositions or with application of conventional plant-modifying agents.

[0304] Accordingly, provided herein is a method of modifying a plant, the method including delivering to the plant an effective amount of any of the Gene Writer systems provided herein, wherein the method modifies the plant and thereby introduces or increases a beneficial trait in the plant (e.g., by about 1%, 2%, 5%, 10%, 20%, 30%, 40%, 50%, 60%, 70%, 80%, 90%, 100%, or more than 100%) relative to an untreated plant. In particular, the method may increase the fitness of the plant (e.g., by about 1%, 2%, 5%, 10%, 20%, 30%, 40%, 50%, 60%, 70%, 80%, 90%, 100%, or more than 100%) relative to an untreated plant.

[0305] In some instances, the increase in plant fitness is an increase (e.g., by about 1%, 2%, 5%, 10%, 20%, 30%, 40%, 50%, 60%, 70%, 80%, 90%, 100%, or more than 100%) in disease resistance, drought tolerance, heat tolerance, cold tolerance, salt tolerance, metal tolerance, herbicide tolerance, chemical tolerance, water use efficiency, nitrogen utilization, resistance to nitrogen stress, nitrogen fixation, pest resistance, herbivore resistance, pathogen resistance, yield, yield under water-limited conditions, vigor, growth, photosynthetic capability, nutrition, protein content, carbohydrate content, oil content, biomass, shoot length, root length, root architecture, seed weight, or amount of harvestable produce.

[0306] In some instances, the increase in fitness is an increase (e.g., by about 1%, 2%, 5%, 10%, 20%, 30%, 40%, 50%, 60%, 70%, 80%, 90%, 100%, or more than 100%) in development, growth, yield, resistance to abiotic stressors, or resistance to biotic stressors. An abiotic stress refers to an environmental stress condition that a plant or a plant part is subjected to that includes, e.g., drought stress, salt stress, heat stress, cold stress, and low nutrient stress. A biotic stress refers to an environmental stress condition that a plant or plant part is subjected to that includes, e.g. nematode stress, insect herbivory stress, fungal pathogen stress, bacterial pathogen stress, or viral pathogen stress. The stress may be temporary, e.g. several hours, several days, several months, or permanent, e.g. for the life of the plant.

[0307] In some s 10%, 20%, 30%, 40%, 50%, 60%, 70%, 80%, 90%, 100%, or more than 100%) in quality of products harvested from the plant. For example, the increase in plant fitness may be an improvement in commercially favorable features (e.g., taste or appearance) of a product harvested from the plant. In other instances, the increase in plant fitness is an increase in shelf-life of a product harvested from the plant (e.g., by about 1%, 2%, 5%, 10%, 20%, 30%, 40%, 50%, 60%, 70%, 80%, 90%, 100%, or more than 100%).

[0308] Alternatively, the increase in fitness may be an alteration of a trait that is beneficial to human or animal health, such as a reduction in allergen production. For example, the increase in fitness may be a decrease (e.g., by about 1%, 2%, 5%, 10%, 20%, 30%, 40%, 50%, 60%, 70%, 80%, 90%, 100%, or more than 100%) in production of an allergen (e.g., pollen) that stimulates an immune response in an animal (e.g., human).

[0309] The modification of the plant (e.g., increase in fitness) may arise from modification of one or more plant parts. For example, the plant can be modified by contacting leaf, seed, pollen, root, fruit, shoot, flower, cells, protoplasts, or tissue (e.g., meristematic tissue) of the plant. As such, in another aspect, provided herein is a method of increasing the fitness of a plant, the method including contacting pollen of the plant with an effective amount of any of the plant-modifying compositions herein, wherein the method increases the fitness of the plant (e.g., by about 1%, 2%, 5%, 10%, 20%, 30%, 40%, 50%, 60%, 70%, 80%, 90%, 100%, or more than 100%) relative to an untreated plant.

[0310] In yet another aspect, provided herein is a method of increasing the fitness of a plant, the method including contacting a seed of the plant with an effective amount of any of the Gene Writer systems disclosed herein, wherein the method increases the fitness of the plant (e.g., by about 1%, 2%, 5%, 10%, 20%, 30%, 40%, 50%, 60%, 70%, 80%, 90%, 100%, or more than 100%) relative to an untreated plant.

[0311] In another aspect, provided herein is a method including contacting a protoplast of the plant with an effective amount of any of the Gene Writer systems described herein, wherein the method increases the fitness of the plant (e.g., by about 1%, 2%, 5%, 10%, 20%, 30%, 40%, 50%, 60%, 70%, 80%, 90%, 100%, or more than 100%) relative to an untreated plant.

[0312] In a further aspect, provided herein is a method of increasing the fitness of a plant, the method including contacting a plant cell of the plant with an effective amount of any of the Gene Writer system described herein, wherein the method increases the fitness of the plant (e.g., by about 1%, 2%, 5%, 10%, 20%, 30%, 40%, 50%, 60%, 70%, 80%, 90%, 100%, or more than 100%) relative to an untreated plant.

[0313] In another aspect, provided herein is a method of increasing the fitness of a plant, the method including contacting meristematic tissue of the plant with an effective amount of any of the plant-modifying compositions herein, wherein the method increases the fitness of the plant (e.g., by about 1%, 2%, 5%, 10%, 20%, 30%, 40%, 50%, 60%, 70%, 80%, 90%, 100%, or more than 100%) relative to an untreated plant.

[0314] In another aspect, provided herein is a method of increasing the fitness of a plant, the method including contacting an embryo of the plant with an effective amount of any of the plant-modifying compositions herein, wherein the method increases the fitness of the plant (e.g., by about 1%, 2%, 5%, 10%, 20%, 30%, 40%, 50%, 60%, 70%, 80%, 90%, 100%, or more than 100%) relative to an untreated plant.

[0315] B. Application Methods

[0316] A plant described herein can be exposed to any of the Gene Writer system compositions described herein in any suitable manner that permits delivering or administering the composition to the plant. The Gene Writer system may be delivered either alone or in combination with other active (e.g., fertilizing agents) or inactive substances and may be applied by, for example, spraying, injection (e.g., microinjection), through plants, pouring, dipping, in the form of concentrated liquids, gels, solutions, suspensions, sprays, powders, pellets, briquettes, bricks and the like, formulated to deliver an effective concentration of the plant-modifying composition. Amounts and locations for application of the compositions described herein are generally determined by the habitat of the plant, the lifecycle stage at which the plant can be targeted by the plant-modifying composition, the site where the application is to be made, and the physical and functional characteristics of the plant-modifying composition.

[0317] In some instances, the composition is sprayed directly onto a plant, e.g., crops, by e.g., backpack spraying, aerial spraying, crop spraying/dusting etc. In instances where the Gene Writer system is delivered to a plant, the plant receiving the Gene Writer system may be at any stage of plant growth. For example, formulated plant-modifying compositions can be applied as a seed-coating or root treatment in early stages of plant growth or as a total plant treatment at later stages of the crop cycle. In some instances, the plant-modifying composition may be applied as a topical agent to a plant.

[0318] Further, the Gene Writer system may be applied (e.g., in the soil in which a plant grows, or in the water that is used to water the plant) as a systemic agent that is absorbed and distributed through the tissues of a plant. In some instances, plants or food organisms may be genetically transformed to express the Gene Writer system.

[0319] Delayed or continuous release can also be accomplished by coating the Gene Writer system or a composition with the plant-modifying composition(s) with a dissolvable or bioerodable coating layer, such as gelatin, which coating dissolves or erodes in the environment of use, to then make the plant-modifying com Gene Writer system position available, or by dispersing the agent in a dissolvable or erodible matrix. Such continuous release and/or dispensing means devices may be advantageously employed to consistently maintain an effective concentration of one or more of the plant-modifying compositions described herein.

[0320] In some instances, the Gene Writer system is delivered to a part of the plant, e.g., a leaf, seed, pollen, root, fruit, shoot, or flower, or a tissue, cell, or protoplast thereof. In some instances, the Gene Writer system is delivered to a cell of the plant. In some instances, the Gene Writer system is delivered to a protoplast of the plant. In some instances, the Gene Writer system is delivered to a tissue of the plant. For example, the composition may be delivered to meristematic tissue of the plant (e.g., apical meristem, lateral meristem, or intercalary meristem). In some instances, the composition is delivered to permanent tissue of the plant (e.g., simple tissues (e.g., parenchyma, collenchyma, or sclerenchyma) or complex permanent tissue (e.g., xylem or phloem)). In some instances, the Gene Writer system is delivered to a plant embryo.

[0321] C. Plants

[0322] A variety of plants can be delivered to or treated with a Gene Writer system described herein. Plants that can be delivered a Gene Writer system (i.e., “treated”) in accordance with the present methods include whole plants and parts thereof, including, but not limited to, shoot vegetative organs/structures (e.g., leaves, stems and tubers), roots, flowers and floral organs/structures (e.g., bracts, sepals, petals, stamens, carpels, anthers and ovules), seed (including embryo, endosperm, cotyledons, and seed coat) and fruit (the mature ovary), plant tissue (e.g., vascular tissue, ground tissue, and the like) and cells (e.g., guard cells, egg cells, and the like), and progeny of same. Plant parts can further refer parts of the plant such as the shoot, root, stem, seeds, stipules, leaves, petals, flowers, ovules, bracts, branches, petioles, internodes, bark, pubescence, tillers, rhizomes, fronds, blades, pollen, stamen, and the like.

[0323] The class of plants that can be treated in a method disclosed herein includes the class of higher and lower plants, including angiosperms (monocotyledonous and dicotyledonous plants), gymnosperms, ferns, horsetails, psilophytes, lycophytes, bryophytes, and algae (e.g., multicellular or unicellular algae). Plants that can be treated in accordance with the present methods further include any vascular plant, for example monocotyledons or dicotyledons or gymnosperms, including, but not limited to alfalfa, apple, Arabidopsis, banana, barley, canola, castor bean, chrysanthemum, clover, cocoa, coffee, cotton, cottonseed, corn, crambe, cranberry, cucumber, dendrobium, dioscorea, eucalyptus, fescue, flax, gladiolus, liliacea, linseed, millet, muskmelon, mustard, oat, oil palm, oilseed rape, papaya, peanut, pineapple, ornamental plants, Phaseolus, potato, rapeseed, rice, rye, ryegrass, safflower, sesame, sorghum, soybean, sugarbeet, sugarcane, sunflower, strawberry, tobacco, tomato, turfgrass, wheat and vegetable crops such as lettuce, celery, broccoli, cauliflower, cucurbits; fruit and nut trees, such as apple, pear, peach, orange, grapefruit, lemon, lime, almond, pecan, walnut, hazel; vines, such as grapes (e.g., a vineyard), kiwi, hops; fruit shrubs and brambles, such as raspberry, blackberry, gooseberry; forest trees, such as ash, pine, fir, maple, oak, chestnut, popular; with alfalfa, canola, castor bean, corn, cotton, crambe, flax, linseed, mustard, oil palm, oilseed rape, peanut, potato, rice, safflower, sesame, soybean, sugarbeet, sunflower, tobacco, tomato, and wheat. Plants that can be treated in accordance with the methods of the present invention include any crop plant, for example, forage crop, oilseed crop, grain crop, fruit crop, vegetable crop, fiber crop, spice crop, nut crop, turf crop, sugar crop, beverage crop, and forest crop. In certain instances, the crop plant that is treated in the method is a soybean plant. In other certain instances, the crop plant is wheat. In certain instances, the crop plant is corn. In certain instances, the crop plant is cotton. In certain instances, the crop plant is alfalfa. In certain instances, the crop plant is sugarbeet. In certain instances, the crop plant is rice. In certain instances, the crop plant is potato. In certain instances, the crop plant is tomato.

[0324] In certain instances, the plant is a crop. Examples of such crop plants include, but are not limited to, monocotyledonous and dicotyledonous plants including, but not limited to, fodder or forage legumes, ornamental plants, food crops, trees, or shrubs selected from Acer spp., Allium spp., Amaranthus spp., Ananas comosus, Apium graveolens, Arachis spp, Asparagus officinalis, Beta vulgaris, Brassica spp. (e.g., Brassica napus, Brassica rapa ssp. (canola, oilseed rape, turnip rape), Camellia sinensis, Canna indica, Cannabis saliva, Capsicum spp., Castanea spp., Cichorium endivia, Citrullus lanatus, Citrus spp., Cocos spp., Coffea spp., Coriandrum sativum, Corylus spp., Crataegus spp., Cucurbita spp., Cucumis spp., Daucus carota, Fagus spp., Ficus carica, Fragaria spp., Ginkgo biloba, Glycine spp. (e.g., Glycine max, Soja hispida or Soja max), Gossypium hirsutum, Helianthus spp. (e.g., Helianthus annuus), Hibiscus spp., Hordeum spp. (e.g., Hordeum vulgare), Ipomoea batatas, Juglans spp., Lactuca sativa, Linum usitatissimum, Litchi chinensis, Lotus spp., Luffa acutangula, Lupinus spp., Lycopersicon spp. (e.g., Lycopersicon esculenturn, Lycopersicon lycopersicum, Lycopersicon pyriforme), Malus spp., Medicago sativa, Mentha spp., Miscanthus sinensis, Morus nigra, Musa spp., Nicotiana spp., Olea spp., Oryza spp. (e.g., Oryza sativa, Oryza latifolia), Panicum miliaceum, Panicum virgatum, Passiflora edulis, Petroselinum crispum, Phaseolus spp., Pinus spp., Pistacia vera, Pisum spp., Poa spp., Populus spp., Prunus spp., Pyrus communis, Quercus spp., Raphanus sativus, Rheum rhabarbarum, Ribes spp., Ricinus communis, Rubus spp., Saccharum spp., Salix sp., Sambucus spp., Secale cereale, Sesamum spp., Sinapis spp., Solanum spp. (e.g., Solanum tuberosum, Solanum integrifolium or Solanum lycopersicum), Sorghum bicolor, Sorghum halepense, Spinacia spp., Tamarindus indica, Theobroma cacao, Trifolium spp., Triticosecale rimpaui, Triticum spp. (e.g., Triticum aestivum, Triticum durum, Triticum turgidum, Triticum hybernum, Triticum macha, Triticum sativum or Triticum vulgare), Vaccinium spp., Vicia spp., Vigna spp., Viola odorata, Vitis spp., and Zea mays. In certain embodiments, the crop plant is rice, oilseed rape, canola, soybean, corn (maize), cotton, sugarcane, alfalfa, sorghum, or wheat.

[0325] The plant or plant part for use in the present invention include plants of any stage of plant development. In certain instances, the delivery can occur during the stages of germination, seedling growth, vegetative growth, and reproductive growth. In certain instances, delivery to the plant occurs during vegetative and reproductive growth stages. In some instances, the composition is delivered to pollen of the plant. In some instances, the composition is delivered to a seed of the plant. In some instances, the composition is delivered to a protoplast of the plant. In some instances, the composition is delivered to a tissue of the plant. For example, the composition may be delivered to meristematic tissue of the plant (e.g., apical meristem, lateral meristem, or intercalary meristem). In some instances, the composition is delivered to permanent tissue of the plant (e.g., simple tissues (e.g., parenchyma, collenchyma, or sclerenchyma) or complex permanent tissue (e.g., xylem or phloem)). In some instances, the composition is delivered to a plant embryo. In some instances, the composition is delivered to a plant cell. The stages of vegetative and reproductive growth are also referred to herein as “adult” or “mature” plants.

[0326] In instances where the Gene Writer system is delivered to a plant part, the plant part may be modified by the plant-modifying agent. Alternatively, the Gene Writer system may be distributed to other parts of the plant (e.g., by the plant's circulatory system) that are subsequently modified by the plant-modifying agent.

### Lipid Nanoparticles

[0327] The methods and systems provided by the invention, may employ any suitable carrier or delivery modality, including, in certain embodiments, lipid nanoparticles (LNPs). Lipid nanoparticles, in some embodiments, comprise one or more ionic lipids, such as non-cationic lipids (e.g., neutral or anionic, or zwitterionic lipids); one or more conjugated lipids (such as PEG-conjugated lipids or lipids conjugated to polymers described in Table 5 of WO2019217941; incorporated herein by reference in its entirety); one or more sterols (e.g., cholesterol); and, optionally, one or more targeting molecules (e.g., conjugated receptors, receptor ligands, antibodies); or combinations of the foregoing.

[0328] Lipids that can be used in nanoparticle formations (e.g., lipid nanoparticles) include, for example those described in Table 4 of WO2019217941, which is incorporated by reference e.g., a lipid-containing nanoparticle can comprise one or more of the lipids in Table 4 of WO2019217941. Lipid nanoparticles can include additional elements, such as polymers, such as the polymers described in Table 5 of WO2019217941, incorporated by reference.

[0329] In some embodiments, conjugated lipids, when present, can include one or more of PEG-diacylglycerol (DAG) (such as 1-(monomethoxy-polyethyleneglycol)-2,3-dimyristoylglycerol (PEG-DMG)), PEG-dialkyloxypropyl (DAA), PEG-phospholipid, PEG-ceramide (Cer), a pegylated phosphatidylethanoloamine (PEG-PE), PEG succinate diacylglycerol (PEGS-DAG) (such as 4-0-(2′,3′-di(tetradecanoyloxy)propyl-1-0-(w-methoxy(polyethoxy)ethyl) butanedioate (PEG-S-DMG)), PEG dialkoxypropylcarbam, N-(carbonyl-methoxypoly ethylene glycol 2000)-1,2-distearoyl-sn-glycero-3-phosphoethanolamine sodium salt, and those described in Table 2 of WO2019051289 (incorporated by reference), and combinations of the foregoing.

[0330] In some embodiments, sterols that can be incorporated into lipid nanoparticles include one or more of cholesterol or cholesterol derivatives, such as those in WO2009/127060 or US2010/0130588, which are incorporated by reference. Additional exemplary sterols include phytosterols, including those described in Eygeris et al (2020), dx.doi.org/10.1021/acs.nanolett.0c01386, incorporated herein by reference.

[0331] In some embodiments, the lipid particle comprises an ionizable lipid, a non-cationic lipid, a conjugated lipid that inhibits aggregation of particles, and a sterol. The amounts of these components can be varied independently and to achieve desired properties. For example, in some embodiments, the lipid nanoparticle comprises an ionizable lipid is in an amount from about 20 mol % to about 90 mol % of the total lipids (in other embodiments it may be 20-70% (mol), 30-60% (mol) or 40-50% (mol); about 50 mol % to about 90 mol % of the total lipid present in the lipid nanoparticle), a non-cationic lipid in an amount from about 5 mol % to about 30 mol % of the total lipids, a conjugated lipid in an amount from about 0.5 mol % to about 20 mol % of the total lipids, and a sterol in an amount from about 20 mol % to about 50 mol % of the total lipids. The ratio of total lipid to nucleic acid (e.g., encoding the Gene Writer or template nucleic acid) can be varied as desired. For example, the total lipid to nucleic acid (mass or weight) ratio can be from about 10:1 to about 30:1.

[0332] In some embodiments, the lipid to nucleic acid ratio (mass/mass ratio; w/w ratio) can be in the range of from about 1:1 to about 25:1, from about 10:1 to about 14:1, from about 3:1 to about 15:1, from about 4:1 to about 10:1, from about 5:1 to about 9:1, or about 6:1 to about 9:1. The amounts of lipids and nucleic acid can be adjusted to provide a desired N/P ratio, for example, N/P ratio of 3, 4, 5, 6, 7, 8, 9, 10 or higher. Generally, the lipid nanoparticle formulation's overall lipid content can range from about 5 mg/ml to about 30 mg/mL.

[0333] Exemplary ionizable lipids that can be used in lipid nanoparticle formulations include, without limitation, those listed in Table 1 of WO2019051289, incorporated herein by reference. Additional exemplary lipids include, without limitation, one or more of the following formulae: X of US2016/0311759; I of US20150376115 or in US2016/0376224; I, II or III of US20160151284; I, IA, II, or IIA of US20170210967; I-c of US20150140070; A of US2013/0178541; I of US2013/0303587 or US2013/0123338; I of US2015/0141678; II, III, IV, or V of US2015/0239926; I of US2017/0119904; I or II of WO2017/117528; A of US2012/0149894; A of US2015/0057373; A of WO2013/116126; A of US2013/0090372; A of US2013/0274523; A of US2013/0274504; A of US2013/0053572; A of WO2013/016058; A of WO2012/162210; I of US2008/042973; I, II, III, or IV of US2012/01287670; I or II of US2014/0200257; I, II, or III of US2015/0203446; I or III of US2015/0005363; I, IA, IB, IC, ID, II, IIA, IIB, IIC, IID, or III-XXIV of US2014/0308304; of US2013/0338210; I, II, III, or IV of WO2009/132131; A of US2012/01011478; I or XXXV of US2012/0027796; XIV or XVII of US2012/0058144; of US2013/0323269; I of US2011/0117125; I, II, or III of US2011/0256175; I, II, III, IV, V, VI, VII, VIII, IX, X, XI, XII of US2012/0202871; I, II, III, IV, V, VI, VII, VIII, X, XII, XIII, XIV, XV, or XVI of US2011/0076335; I or II of US2006/008378; I of US2013/0123338; I or X-A-Y-Z of US2015/0064242; XVI, XVII, or XVIII of US2013/0022649; I, II, or III of US2013/0116307; I, II, or III of US2013/0116307; I or II of US2010/0062967; I-X of US2013/0189351; I of US2014/0039032; V of US2018/0028664; I of US2016/0317458; I of US2013/0195920.

[0334] In some embodiments, the ionizable lipid is MC3 (6Z,9Z,28Z,31Z)-heptatriaconta-6,9,28,31-tetraen-19-yl-4-(dimethylamino) butanoate (DLin-MC3-DMA or MC3), e.g., as described in Example 9 of WO2019051289A9 (incorporated by reference herein in its entirety). In some embodiments, the ionizable lipid is the lipid ATX-002, e.g., as described in Example 10 of WO2019051289A9 (incorporated by reference herein in its entirety). In some embodiments, the ionizable lipid is (13Z,16Z)-A,A-dimethyl-3-nonyldocosa-13, 16-dien-1-amine (Compound 32), e.g., as described in Example 11 of WO2019051289A9 (incorporated by reference herein in its entirety). In some embodiments, the ionizable lipid is Compound 6 or Compound 22, e.g., as described in Example 12 of WO2019051289A9 (incorporated by reference herein in its entirety).

[0335] Exemplary non-cationic lipids include, but are not limited to, distearoyl-sn-glycero-phosphoethanolamine, distearoylphosphatidylcholine (DSPC), dioleoylphosphatidylcholine (DOPC), dipalmitoylphosphatidylcholine (DPPC), dioleoylphosphatidylglycerol (DOPG), dipalmitoylphosphatidylglycerol (DPPG), dioleoyl-phosphatidylethanolamine (DOPE), palmitoyloleoylphosphatidylcholine (POPC), palmitoyloleoylphosphatidylethanolamine (POPE), dioleoyl-phosphatidylethanolamine 4-(N-maleimidomethyl)-cyclohexane-1-carboxylate (DOPE-mal), dipalmitoyl phosphatidyl ethanolamine (DPPE), dimyristoylphosphoethanolamine (DMPE), distearoyl-phosphatidyl-ethanolamine (DSPE), monomethyl-phosphatidylethanolamine (such as 16-O-monomethyl PE), dimethyl-phosphatidylethanolamine (such as 16-O-dimethyl PE), 18-1-trans PE, 1-stearoyl-2-oleoyl-phosphatidyethanolamine (SOPE), hydrogenated soy phosphatidylcholine (HSPC), egg phosphatidylcholine (EPC), dioleoylphosphatidylserine (DOPS), sphingomyelin (SM), dimyristoyl phosphatidylcholine (DMPC), dimyristoyl phosphatidylglycerol (DMPG), distearoylphosphatidylglycerol (DSPG), dierucoylphosphatidylcholine (DEPC), palmitoyloleyolphosphatidylglycerol (POPG), dielaidoyl-phosphatidylethanolamine (DEPE), lecithin, phosphatidylethanolamine, lysolecithin, lysophosphatidylethanolamine, phosphatidylserine, phosphatidylinositol, sphingomyelin, egg sphingomyelin (ESM), cephalin, cardiolipin, phosphatidicacid, cerebrosides, dicetylphosphate, lysophosphatidylcholine, dilinoleoylphosphatidylcholine, or mixtures thereof. It is understood that other diacylphosphatidylcholine and diacylphosphatidylethanolamine phospholipids can also be used. The acyl groups in these lipids are preferably acyl groups derived from fatty acids having C10-C24 carbon chains, e.g., lauroyl, myristoyl, paimitoyl, stearoyl, or oleoyl. Additional exemplary lipids, in certain embodiments, include, without limitation, those described in Kim et al. (2020) dx.doi.org/10.1021/acs.nanolett.0c01386, incorporated herein by reference. Such lipids include, in some embodiments, plant lipids found to improve liver transfection with mRNA (e.g., DGTS).

[0336] Other examples of non-cationic lipids suitable for use in the lipid nanoparticles include, without limitation, nonphosphorous lipids such as, e.g., stearylamine, dodeeylamine, hexadecylamine, acetyl palmitate, glycerol ricinoleate, hexadecyl stereate, isopropyl myristate, amphoteric acrylic polymers, triethanolamine-lauryl sulfate, alkyl-aryl sulfate polyethyloxylated fatty acid amides, dioctadecyl dimethyl ammonium bromide, ceramide, sphingomyelin, and the like. Other non-cationic lipids are described in WO2017/099823 or US patent publication US2018/0028664, the contents of which is incorporated herein by reference in their entirety.

[0337] In some embodiments, the non-cationic lipid is oleic acid or a compound of Formula I, II, or IV of US2018/0028664, incorporated herein by reference in its entirety. The non-cationic lipid can comprise, for example, 0-30% (mol) of the total lipid present in the lipid nanoparticle. In some embodiments, the non-cationic lipid content is 5-20% (mol) or 10-15% (mol) of the total lipid present in the lipid nanoparticle. In embodiments, the molar ratio of ionizable lipid to the neutral lipid ranges from about 2:1 to about 8:1 (e.g., about 2:1, 3:1, 4:1, 5:1, 6:1, 7:1, or 8:1).

[0338] In some embodiments, the lipid nanoparticles do not comprise any phospholipids.

[0339] In some aspects, the lipid nanoparticle can further comprise a component, such as a sterol, to provide membrane integrity. One exemplary sterol that can be used in the lipid nanoparticle is cholesterol and derivatives thereof. Non-limiting examples of cholesterol derivatives include polar analogues such as 5a-choiestanol, 53-coprostanol, choiesteryl-(2′-hydroxy)-ethyl ether, choiesteryl-(4′-hydroxy)-butyl ether, and 6-ketocholestanol; non-polar analogues such as 5a-cholestane, cholestenone, 5a-cholestanone, 5p-cholestanone, and cholesteryl decanoate; and mixtures thereof. In some embodiments, the cholesterol derivative is a polar analogue, e.g., choiesteryl-(4′-hydroxy)-butyl ether. Exemplary cholesterol derivatives are described in PCT publication WO2009/127060 and US patent publication US2010/0130588, each of which is incorporated herein by reference in its entirety.

[0340] In some embodiments, the component providing membrane integrity, such as a sterol, can comprise 0-50% (mol) (e.g., 0-10%, 10-20%, 20-30%, 30-40%, or 40-50%) of the total lipid present in the lipid nanoparticle. In some embodiments, such a component is 20-50% (mol) 30-40% (mol) of the total lipid content of the lipid nanoparticle.

[0341] In some embodiments, the lipid nanoparticle can comprise a polyethylene glycol (PEG) or a conjugated lipid molecule. Generally, these are used to inhibit aggregation of lipid nanoparticles and/or provide steric stabilization. Exemplary conjugated lipids include, but are not limited to, PEG-lipid conjugates, polyoxazoline (POZ)-lipid conjugates, polyamide-lipid conjugates (such as ATTA-lipid conjugates), cationic-polymer lipid (CPL) conjugates, and mixtures thereof. In some embodiments, the conjugated lipid molecule is a PEG-lipid conjugate, for example, a (methoxy polyethylene glycol)-conjugated lipid.

[0342] Exemplary PEG-lipid conjugates include, but are not limited to, PEG-diacylglycerol (DAG) (such as 1-(monomethoxy-polyethyleneglycol)-2,3-dimyristoylglycerol (PEG-DMG)), PEG-dialkyloxypropyl (DAA), PEG-phospholipid, PEG-ceramide (Cer), a pegylated phosphatidylethanoloamine (PEG-PE), PEG succinate diacylglycerol (PEGS-DAG) (such as 4-0-(2′,3′-di(tetradecanoyloxy)propyl-1-0-(w-methoxy(polyethoxy)ethyl) butanedioate (PEG-S-DMG)), PEG dialkoxypropylcarbam, N-(carbonyl-methoxypolyethylene glycol 2000)-1,2-distearoyl-sn-glycero-3-phosphoethanolamine sodium salt, or a mixture thereof. Additional exemplary PEG-lipid conjugates are described, for example, in U.S. Pat. Nos. 5,885,613, 6,287,591, US2003/0077829, US2003/0077829, US2005/0175682, US2008/0020058, US2011/0117125, US2010/0130588, US2016/0376224, US2017/0119904, and US/099823, the contents of all of which are incorporated herein by reference in their entirety. In some embodiments, a PEG-lipid is a compound of Formula III, III-a-I, III-a-2, III-b-1, III-b-2, or V of US2018/0028664, the content of which is incorporated herein by reference in its entirety. In some embodiments, a PEG-lipid is of Formula II of US20150376115 or US2016/0376224, the content of both of which is incorporated herein by reference in its entirety. In some embodiments, the PEG-DAA conjugate can be, for example, PEG-dilauryloxypropyl, PEG-dimyristyloxypropyl, PEG-dipalmityloxypropyl, or PEG-distearyloxypropyl. The PEG-lipid can be one or more of PEG-DMG, PEG-dilaurylglycerol, PEG-dipalmitoylglycerol, PEG-disterylglycerol, PEG-dilaurylglycamide, PEG-dimyristylglycamide, PEG-dipalmitoylglycamide, PEG-disterylglycamide, PEG-cholesterol (1-[8′-(Cholest-5-en-3[beta]-oxy)carboxamido-3′,6′-dioxaoctanyl] carbamoyl-[omega]-methyl-poly(ethylene glycol), PEG-DMB (3,4-Ditetradecoxylbenzyl-[omega]-methyl-poly(ethylene glycol) ether), and 1,2-dimyristoyl-sn-glycero-3-phosphoethanolamine-N-[methoxy(polyethylene glycol)-2000]. In some embodiments, the PEG-lipid comprises PEG-DMG, 1,2-dimyristoyl-sn-glycero-3-phosphoethanolamine-N-[methoxy(polyethylene glycol)-2000]. In some embodiments, the PEG-lipid comprises a structure selected from:

[chemical structure]

[0343] In some embodiments, lipids conjugated with a molecule other than a PEG can also be used in place of PEG-lipid. For example, polyoxazoline (POZ)-lipid conjugates, polyamide-lipid conjugates (such as ATTA-lipid conjugates), and cationic-polymer lipid (GPL) conjugates can be used in place of or in addition to the PEG-lipid.

[0344] Exemplary conjugated lipids, i.e., PEG-lipids, (POZ)-lipid conjugates, ATTA-lipid conjugates and cationic polymer-lipids are described in the PCT and LIS patent applications listed in Table 2 of WO2019051289A9, the contents of all of which are incorporated herein by reference in their entirety.

[0345] In some embodiments, the PEG or the conjugated lipid can comprise 0-20% (mol) of the total lipid present in the lipid nanoparticle. In some embodiments, PEG or the conjugated lipid content is 0.5-10% or 2-5% (mol) of the total lipid present in the lipid nanoparticle. Molar ratios of the ionizable lipid, non-cationic-lipid, sterol, and PEG/conjugated lipid can be varied as needed. For example, the lipid particle can comprise 30-70% ionizable lipid by mole or by total weight of the composition, 0-60% cholesterol by mole or by total weight of the composition, 0-30% non-cationic-lipid by mole or by total weight of the composition and 1-10% conjugated lipid by mole or by total weight of the composition. Preferably, the composition comprises 30-40% ionizable lipid by mole or by total weight of the composition, 40-50% cholesterol by mole or by total weight of the composition, and 10-20% non-cationic-lipid by mole or by total weight of the composition. In some other embodiments, the composition is 50-75% ionizable lipid by mole or by total weight of the composition, 20-40% cholesterol by mole or by total weight of the composition, and 5 to 10% non-cationic-lipid, by mole or by total weight of the composition and 1-10% conjugated lipid by mole or by total weight of the composition. The composition may contain 60-70% ionizable lipid by mole or by total weight of the composition, 25-35% cholesterol by mole or by total weight of the composition, and 5-10% non-cationic-lipid by mole or by total weight of the composition. The composition may also contain up to 90% ionizable lipid by mole or by total weight of the composition and 2 to 15% non-cationic lipid by mole or by total weight of the composition. The formulation may also be a lipid nanoparticle formulation, for example comprising 8-30% ionizable lipid by mole or by total weight of the composition, 5-30% non-cationic lipid by mole or by total weight of the composition, and 0-20% cholesterol by mole or by total weight of the composition; 4-25% ionizable lipid by mole or by total weight of the composition, 4-25% non-cationic lipid by mole or by total weight of the composition, 2 to 25% cholesterol by mole or by total weight of the composition, 10 to 35% conjugate lipid by mole or by total weight of the composition, and 5% cholesterol by mole or by total weight of the composition; or 2-30% ionizable lipid by mole or by total weight of the composition, 2-30% non-cationic lipid by mole or by total weight of the composition, 1 to 15% cholesterol by mole or by total weight of the composition, 2 to 35% conjugate lipid by mole or by total weight of the composition, and 1-20% cholesterol by mole or by total weight of the composition; or even up to 90% ionizable lipid by mole or by total weight of the composition and 2-10% non-cationic lipids by mole or by total weight of the composition, or even 100% cationic lipid by mole or by total weight of the composition. In some embodiments, the lipid particle formulation comprises ionizable lipid, phospholipid, cholesterol and a PEG-ylated lipid in a molar ratio of 50:10:38.5:1.5. In some other embodiments, the lipid particle formulation comprises ionizable lipid, cholesterol and a PEG-ylated lipid in a molar ratio of 60:38.5:1.5.

[0346] In some embodiments, the lipid particle comprises ionizable lipid, non-cationic lipid (e.g. phospholipid), a sterol (e.g., cholesterol) and a PEG-ylated lipid, where the molar ratio of lipids ranges from 20 to 70 mole percent for the ionizable lipid, with a target of 40-60, the mole percent of non-cationic lipid ranges from 0 to 30, with a target of 0 to 15, the mole percent of sterol ranges from 20 to 70, with a target of 30 to 50, and the mole percent of PEG-ylated lipid ranges from 1 to 6, with a target of 2 to 5.

[0347] In some embodiments, the lipid particle comprises ionizable lipid/non-cationic-lipid/sterol/conjugated lipid at a molar ratio of 50:10:38.5:1.5.

[0348] In an aspect, the disclosure provides a lipid nanoparticle formulation comprising phospholipids, lecithin, phosphatidylcholine and phosphatidylethanolamine.

[0349] In some embodiments, one or more additional compounds can also be included. Those compounds can be administered separately or the additional compounds can be included in the lipid nanoparticles of the invention. In other words, the lipid nanoparticles can contain other compounds in addition to the nucleic acid or at least a second nucleic acid, different than the first. Without limitations, other additional compounds can be selected from the group consisting of small or large organic or inorganic molecules, monosaccharides, disaccharides, trisaccharides, oligosaccharides, polysaccharides, peptides, proteins, peptide analogs and derivatives thereof, peptidomimetics, nucleic acids, nucleic acid analogs and derivatives, an extract made from biological materials, or any combinations thereof.

[0350] In some embodiments, LNPs are directed to specific tissues by the addition of targeting domains. For example, biological ligands may be displayed on the surface of LNPs to enhance interaction with cells displaying cognate receptors, thus driving association with and cargo delivery to tissues wherein cells express the receptor. In some embodiments, the biological ligand may be a ligand that drives delivery to the liver, e.g., LNPs that display GalNAc result in delivery of nucleic acid cargo to hepatocytes that display asialoglycoprotein receptor (ASGPR). The work of Akinc et al. Mol Ther 18(7):1357-1364 (2010) teaches the conjugation of a trivalent GalNAc ligand to a PEG-lipid (GalNAc-PEG-DSG) to yield LNPs dependent on ASGPR for observable LNP cargo effect (see, e.g., FIG. 6). Other ligand-displaying LNP formulations, e.g., incorporating folate, transferrin, or antibodies, are discussed in WO2017223135, which is incorporated herein by reference in its entirety, in addition to the references used therein, namely Kolhatkar et al., Curr Drug Discov Technol. 2011 8:197-206; Musacchio and Torchilin, Front Biosci. 2011 16:1388-1412; Yu et al., Mol Membr Biol. 2010 27:286-298; Patil et al., Crit Rev Ther Drug Carrier Syst. 2008 25:1-61; Benoit et al., Biomacromolecules. 2011 12:2708-2714; Zhao et al., Expert Opin Drug Deliv. 2008 5:309-319; Akinc et al., Mol Ther. 2010 18:1357-1364; Srinivasan et al., Methods Mol Biol. 2012 820:105-116; Ben-Arie et al., Methods Mol Biol. 2012 757:497-507; Peer 2010 J Control Release. 20:63-68; Peer et al., Proc Natl Acad Sci USA. 2007 104:4095-4100; Kim et al., Methods Mol Biol. 2011 721:339-353; Subramanya et al., Mol Ther. 2010 18:2028-2037; Song et al., Nat Biotechnol. 2005 23:709-717; Peer et al., Science. 2008 319:627-630; and Peer and Lieberman, Gene Ther. 2011 18:1127-1133.

[0351] In some embodiments, LNPs are selected for tissue-specific activity by the addition of a Selective ORgan Targeting (SORT) molecule to a formulation comprising traditional components, such as ionizable cationic lipids, amphipathic phospholipids, cholesterol and poly(ethylene glycol) (PEG) lipids. The teachings of Cheng et al. Nat Nanotechnol 15(4):313-320 (2020) demonstrate that the addition of a supplemental “SORT” component precisely alters the in vivo RNA delivery profile and mediates tissue-specific (e.g., lungs, liver, spleen) gene delivery and editing as a function of the percentage and biophysical property of the SORT molecule.

[0352] In some embodiments, the LNPs comprise biodegradable, ionizable lipids. In some embodiments, the LNPs comprise (9Z,12Z)-3-((4,4-bis(octyloxy)butanoyl)oxy)-2-((((3-(diethylamino)propoxy)carbonyl)oxy)methyl)propyl octadeca-9,12-dienoate, also called 3-((4,4-bis(octyloxy)butanoyl)oxy)-2-((((3-(diethylamino)propoxy)carbonyl)oxy)methyl)propyl (9Z,12Z)-octadeca-9,12-dienoate) or another ionizable lipid. See, e.g, lipids of WO2019/067992, WO/2017/173054, WO2015/095340, and WO2014/136086, as well as references provided therein. In some embodiments, the term cationic and ionizable in the context of LNP lipids is interchangeable, e.g., wherein ionizable lipids are cationic depending on the pH.

[0353] In some embodiments, multiple components of a Gene Writer system may be prepared as a single LNP formulation, e.g., an LNP formulation comprises mRNA encoding for the Gene Writer polypeptide and an RNA template. Ratios of nucleic acid components may be varied in order to maximize the properties of a therapeutic. In some embodiments, the ratio of RNA template to mRNA encoding a Gene Writer polypeptide is about 1:1 to 100:1, e.g., about 1:1 to 20:1, about 20:1 to 40:1, about 40:1 to 60:1, about 60:1 to 80:1, or about 80:1 to 100:1, by molar ratio. In other embodiments, a system of multiple nucleic acids may be prepared by separate formulations, e.g., one LNP formulation comprising a template RNA and a second LNP formulation comprising an mRNA encoding a Gene Writer polypeptide. In some embodiments, the system may comprise more than two nucleic acid components formulated into LNPs. In some embodiments, the system may comprise a protein, e.g., a Gene Writer polypeptide, and a template RNA formulated into at least one LNP formulation.

[0354] In some embodiments, the average LNP diameter of the LNP formulation may be between 10s of nm and 100s of nm, e.g., measured by dynamic light scattering (DLS). In some embodiments, the average LNP diameter of the LNP formulation may be from about 40 nm to about 150 nm, such as about 40 nm, 45 nm, 50 nm, 55 nm, 60 nm, 65 nm, 70 nm, 75 nm, 80 nm, 85 nm, 90 nm, 95 nm, 100 nm, 105 nm, 110 nm, 115 nm, 120 nm, 125 nm, 130 nm, 135 nm, 140 nm, 145 nm, or 150 nm. In some embodiments, the average LNP diameter of the LNP formulation may be from about 50 nm to about 100 nm, from about 50 nm to about 90 nm, from about 50 nm to about 80 nm, from about 50 nm to about 70 nm, from about 50 nm to about 60 nm, from about 60 nm to about 100 nm, from about 60 nm to about 90 nm, from about 60 nm to about 80 nm, from about 60 nm to about 70 nm, from about 70 nm to about 100 nm, from about 70 nm to about 90 nm, from about 70 nm to about 80 nm, from about 80 nm to about 100 nm, from about 80 nm to about 90 nm, or from about 90 nm to about 100 nm. In some embodiments, the average LNP diameter of the LNP formulation may be from about 70 nm to about 100 nm. In a particular embodiment, the average LNP diameter of the LNP formulation may be about 80 nm. In some embodiments, the average LNP diameter of the LNP formulation may be about 100 nm. In some embodiments, the average LNP diameter of the LNP formulation ranges from about 1 mm to about 500 mm, from about 5 mm to about 200 mm, from about 10 mm to about 100 mm, from about 20 mm to about 80 mm, from about 25 mm to about 60 mm, from about 30 mm to about 55 mm, from about 35 mm to about 50 mm, or from about 38 mm to about 42 mm.

[0355] A LNP may, in some instances, be relatively homogenous. A polydispersity index may be used to indicate the homogeneity of a LNP, e.g., the particle size distribution of the lipid nanoparticles. A small (e.g., less than 0.3) polydispersity index generally indicates a narrow particle size distribution. A LNP may have a polydispersity index from about 0 to about 0.25, such as 0.01, 0.02, 0.03, 0.04, 0.05, 0.06, 0.07, 0.08, 0.09, 0.10, 0.11, 0.12, 0.13, 0.14, 0.15, 0.16, 0.17, 0.18, 0.19, 0.20, 0.21, 0.22, 0.23, 0.24, or 0.25. In some embodiments, the polydispersity index of a LNP may be from about 0.10 to about 0.20.

[0356] The zeta potential of a LNP may be used to indicate the electrokinetic potential of the composition. In some embodiments, the zeta potential may describe the surface charge of a LNP. Lipid nanoparticles with relatively low charges, positive or negative, are generally desirable, as more highly charged species may interact undesirably with cells, tissues, and other elements in the body. In some embodiments, the zeta potential of a LNP may be from about −10 mV to about +20 mV, from about −10 mV to about +15 mV, from about −10 mV to about +10 mV, from about −10 mV to about +5 mV, from about −10 mV to about 0 mV, from about −10 mV to about −5 mV, from about −5 mV to about +20 mV, from about −5 mV to about +15 mV, from about −5 mV to about +10 mV, from about −5 mV to about +5 mV, from about −5 mV to about 0 mV, from about 0 mV to about +20 mV, from about 0 mV to about +15 mV, from about 0 mV to about +10 mV, from about 0 mV to about +5 mV, from about +5 mV to about +20 mV, from about +5 mV to about +15 mV, or from about +5 mV to about +10 mV.

[0357] The efficiency of encapsulation of a protein and/or nucleic acid, e.g., Gene Writer polypeptide or mRNA encoding the polypeptide, describes the amount of protein and/or nucleic acid that is encapsulated or otherwise associated with a LNP after preparation, relative to the initial amount provided. The encapsulation efficiency is desirably high (e.g., close to 100%). The encapsulation efficiency may be measured, for example, by comparing the amount of protein or nucleic acid in a solution containing the lipid nanoparticle before and after breaking up the lipid nanoparticle with one or more organic solvents or detergents. An anion exchange resin may be used to measure the amount of free protein or nucleic acid (e.g., RNA) in a solution. Fluorescence may be used to measure the amount of free protein and/or nucleic acid (e.g., RNA) in a solution. For the lipid nanoparticles described herein, the encapsulation efficiency of a protein and/or nucleic acid may be at least 50%, for example 50%, 55%, 60%, 65%, 70%, 75%, 80%, 85%, 90%, 91%, 92%, 93%, 94%, 95%, 96%, 97%, 98%, 99%, or 100%. In some embodiments, the encapsulation efficiency may be at least 80%. In some embodiments, the encapsulation efficiency may be at least 90%. In some embodiments, the encapsulation efficiency may be at least 95%.

[0358] A LNP may optionally comprise one or more coatings. In some embodiments, a LNP may be formulated in a capsule, film, or table having a coating. A capsule, film, or tablet including a composition described herein may have any useful size, tensile strength, hardness or density.

[0359] Additional exemplary lipids, formulations, methods, and characterization of LNPs are taught by WO2020061457, which is incorporated herein by reference in its entirety.

[0360] In some embodiments, in vitro or ex vivo cell lipofections are performed using Lipofectamine MessengerMax (Thermo Fisher) or TransIT-mRNA Transfection Reagent (Mirus Bio). In certain embodiments, LNPs are formulated using the GenVoy_ILM ionizable lipid mix (Precision NanoSystems). In certain embodiments, LNPs are formulated using 2,2-dilinoleyl-4-dimethylaminoethyl-[1,3]-dioxolane (DLin-KC2-DMA) or dilinoleylmethyl-4-dimethylaminobutyrate (DLin-MC3-DMA or MC3), the formulation and in vivo use of which are taught in Jayaraman et al. Angew Chem Int Ed Engl 51(34):8529-8533 (2012), incorporated herein by reference in its entirety.

[0361] LNP formulations optimized for the delivery of CRISPR-Cas systems, e.g., Cas9-gRNA RNP, gRNA, Cas9 mRNA, are described in WO2019067992 and WO2019067910, both incorporated by reference.

[0362] Additional specific LNP formulations useful for delivery of nucleic acids are described in U.S. Pat. Nos. 8,158,601 and 8,168,775, both incorporated by reference, which include formulations used in patisiran, sold under the name ONPATTRO.

[0363] Exemplary dosing of Gene Writer LNP may include about 0.1, 0.25, 0.3, 0.5, 1, 2, 3, 4, 5, 6, 8, 10, or 100 mg/kg (RNA). Exemplary dosing of AAV comprising a nucleic acid encoding one or more components of the system may include an MOI of about 10¹¹, 10¹², 10¹³, and 10¹⁴ vg/kg.

[0364] All publications, patent applications, patents, and other publications and references (e.g., sequence database reference numbers) cited herein are incorporated by reference in their entirety. For example, all GenBank, Unigene, and Entrez sequences referred to herein, e.g., in any Table herein, are incorporated by reference. Unless otherwise specified, the sequence accession numbers specified herein, including in any Table herein, refer to the database entries current as of Jul. 19, 2019. When one gene or protein references a plurality of sequence accession numbers, all of the sequence variants are encompassed.

### EXAMPLES

[0365] The invention is further illustrated by the following examples. The examples are provided for illustrative purposes only and are not to be construed as limiting the scope or content of the invention in any way.

### Example 1: Delivery of a Gene Writer™ System to Mammalian Cells

[0366] This example describes a Gene Writer™ genome editing system delivered to a mammalian cell for site-specific insertion of exogenous DNA into a mammalian cell genome.

[0367] In this example, the polypeptide component of the Gene Writer™ system is a recombinase protein selected from Table 1, column 1, and the template DNA component is a plasmid DNA that comprises a target recombination site, e.g., as listed in a corresponding row of Table 1.

[0368] HEK293T cells are transfected with the following test agents:
[0369] 1. Scrambled DNA control
[0370] 2. DNA coding for the polypeptide described above
[0371] 3. Template DNA described above
[0372] 4. Combination of 2 and 3

[0373] After transfection, HEK293T cells are cultured for at least 4 days and then assayed for site-specific genome editing. Genomic DNA is isolated from each group of HEK293 cells. PCR is conducted with primers that flank the appropriate genomic locus selected from Table 1 column 4. The PCR product is run on an agarose gel to measure the length of the amplified DNA.

[0374] A PCR product of the expected length, indicative of a successful Gene Writing™ genome editing event that inserts the DNA plasmid template into the target genome, is observed only in cells that were transfected with the complete Gene Writer™ system of group 4 above.

### Example 2: Targeted Delivery of a Gene Expression Unit into Mammalian Cells Using a Gene Writer™ System

[0375] This example describes the making and using of a Gene Writer genome editor to insert a heterologous gene expression unit into the mammalian genome.

[0376] In this example, a recombinase protein is selected from Table 1, column 1. The recombinase protein targets the corresponding genomic locus listed in column 4 of Table 1 for DNA integration. The template DNA component is a plasmid DNA that comprises a target recombination site and gene expression unit. A gene expression unit comprises at least one regulatory sequence operably linked to at least one coding sequence. In this example, the regulatory sequences include the CMV promoter and enhancer, an enhanced translation element, and a WPRE. The coding sequence is the GFP open reading frame.

[0377] HEK293 cells are transfected with the following test agents:
[0378] 1. Scrambled DNA control
[0379] 2. DNA coding for the polypeptide described above
[0380] 3. Template DNA described above
[0381] 4. Combination of 2 and 3

[0382] After transfection, HEK293 cells are cultured for at least 4 days and assayed for site-specific Gene Writing genome editing. Genomic DNA is isolated from the HEK293 cells and PCR is conducted with primers that flank the target integration site in the genome. The PCR product is run on an agarose gel to measure the length of DNA. A PCR product of the expected length, indicative of a successful Gene Writing™ genome editing event, is detected in cells transfected with the test agent of group 4 (complete Gene Writer™ system).

[0383] The transfected cells are cultured for a further 10 days, and after multiple cell culture passages are assayed for GFP expression via flow cytometry. The percent of cells that are GFP positive from each cell population are calculated. GFP positive cells are detected in the population of HEK293 cells that were transfected with group 4 test agent, demonstrating that a gene expression unit added into the mammalian cell genome via Gene Writing genome editing is expressed.

### Example 3: Targeted Delivery of a Splice Acceptor Unit into Mammalian Cells Using a Gene Writer™ System

[0384] This example describes the making and use of a Gene Writing genome editing system to add a heterologous sequence into an intronic region to act as a splice acceptor for an upstream exon. Splicing into the first intron a new exon containing a splice acceptor site at the 5′ end and a polyA tail at the 3′ end will result in a mature mRNA containing the first natural exon of the natural locus spliced to the new exon.

[0385] In this example, a recombinase protein selected from Table 1, column 1. The recombinase protein targets the corresponding genomic locus listed in Table 1, column 4, for DNA integration. The template DNA codes for GFP with a splice acceptor site immediately 5′ to the first amino acid of mature GFP (the start codon is removed) and a 3′ polyA tail downstream of the stop codon.

[0386] HEK293 cells are transfected with the following test agents:
[0387] 1. Scrambled DNA control
[0388] 2. DNA coding for the polypeptide described above
[0389] 3. Template DNA described above
[0390] 4. Combination of 2 and 3

[0391] After transfection, HEK293 cells are cultured for at least 4 days and assayed for site-specific Gene Writing genome editing and appropriate mRNA processing. Genomic DNA is isolated from the HEK293 cells. Reverse transcription-PCR is conducted to measure the mature mRNA containing the first natural exon of the target locus and the new exon. The RT-PCR reaction is conducted with forward primers that bind to the first natural exon of the target locus and with reverse primers that bind to GFP. The RT-PCR product is run on an agarose gel to measure the length of DNA. A PCR product of the expected length is detected in cells transfected with the test agent of group 4, indicative of a successful Gene Writing genome editing event and a successful splice event. This result would demonstrate that a Gene Writing genome editing system can add a heterologous sequence encoding a gene into an intronic region to act as a splice acceptor for the upstream exon.

[0392] The transfected cells are cultured for a further 10 days and, after multiple cell culture passages, are assayed for GFP expression via flow cytometry. The percent of cells that are GFP positive from each cell population are calculated. GFP positive cells are detected in the population of HEK293 cells that were transfected with group 4 test agent, demonstrating that a gene expression unit added into the mammalian cell genome via Gene Writing genome editing is expressed.

### Example 4: Specificity of Gene Writing in Mammalian Cells

[0393] This example describes a Gene Writer™ genome system delivered to a mammalian cell for site-specific insertion of exogenous DNA into a mammalian cell genome and a measurement of the specificity of the site-specific insertion.

[0394] In this example, Gene Writing is conducted in HEK293T cells as described in any of the preceding Examples. After transfection, HEK293T cells are cultured for at least 4 days and then assayed for site-specific genome editing. Linear amplification PCR is conducted as described in Schmidt et al. Nature Methods 4, 1051-1057 (2007) using a forward primer specific to the template DNA that will amplify adjacent genomic DNA. Amplified PCR products are then sequenced using next generation sequencing technology on a MiSeq instrument. The MiSeq reads are mapped to the HEK293T genome to identify integration sites in the genome.

[0395] The percent of LAM-PCR sequencing reads that map to the target genomic site is the specificity of the Gene Writer.

[0396] The number of total genomic sites that LAM-PCR sequencing reads map to is the number of total integration sites.

### Example 5: Efficiency of Gene Writing in Mammalian Cells

[0397] This example describes Gene Writer™ genome system delivered to a mammalian cell for site-specific insertion of exogenous DNA into a mammalian cell genome, and a measurement of the efficiency of Gene Writing.

[0398] In this example, Gene Writing is conducted in HEK293T cells as described in any of the preceding Examples. After transfection, HEK293T cells are cultured for at least 4 days and then assayed for site-specific genome editing. Digital droplet PCR is conducted as described in Lin et al., Human Gene Therapy Methods 27(5), 197-208, 2016. A forward primer binds to the template DNA and a reverse primer binds on one side of the appropriate genomic locus selected from Table 1 column 4, thus a PCR amplification is only expected upon integration of target DNA. A probe to the target site containing a FAM fluorophore and is used to measure the number of copies of the target DNA in the genome. Primers and HEX-fluorophore probe specific to a housekeeping gene (e.g. RPP30) are used to measure the copies of genomic DNA per droplet.

[0399] The copy number of target DNA per droplet normalized to the copy number of house keeping DNA per droplet is the efficiency of the Gene Writer.

### Example 6: Determination of Copy Number of a Recombinase in a Cell

[0400] The following example describes the absolute quantification of a recombinase on a per cell basis. This measurement is performed using the AQUA mass spectrometry based methods, e.g., as accessible at the following uniform resource locator (URL):https://www.sciencedirect.com/science/article/pii/S1046202304002087?via%3Dihub

[0401] Following delivery of the recombinase and DNA template to the cells, the recombination is allowed to proceed for 24 hours after which the cells are quantified and then quantified by this MS method. This method involves two stages.

[0402] In the first stage, the amino acid sequence of the recombinase is examined, and a representative tryptic peptide is selected for analysis. An AQUA peptide is then synthesized with an amino acid sequence that exactly mimics the corresponding native peptide produced during proteolysis. However, stable isotopes are incorporated at one residue to allow the mass spectrometer to differentiate between the analyte and internal standard. The synthetic peptide and the native peptide share the same physicochemical properties including chromatographic co-elution, ionization efficiency, and relative distributions of fragment ions, but are differentially detected in a mass spectrometer due to their mass difference. The synthetic peptide is next analyzed by LC-MS/MS techniques to confirm the retention time of the peptide, determine fragment ion intensities, and select an ion for SRM analysis. In such an SRM experiment, a triple quadrupole mass spectrometer is directed to select the expected precursor ion in the first scanning quadrupole, or Q1. Only ions with this one mass-to-charge (m/z) ratio are directed into the collision cell (Q2) to be fragmented. The resulting product ions are passed to the third quadrupole (Q3), where the m/z ratio for single fragment ion is monitored across a narrow m/z window.

[0403] The second stage involves quantification of the recombinase from cell or tissue lysates. A quantified number of cells or mass of tissue is used to initiate the reaction and is used to normalize the quantification to a per cell basis. Cell lysates are separated prior to proteolysis to increase the dynamic range of the assay via SDS-PAGE, followed by excision of the region of the gel where the recombinase migrates. In-gel digestion is performed to obtain native tryptic peptides. In-gel digestion is performed in the presence of the AQUA peptide, which is added to the gel pieces during the digestion process. Following proteolysis, the complex peptide mixture, containing both heavy and light peptides, is analyzed in an LC-SRM experiment using parameters determined during the first stage.

[0404] The results of the mass spectrometry-based quantification is converted to a number of proteins loaded to determine the number of recombinases per cell.

### Example 7: Copy Number of DNA Inside Cell

### Q-FISH

[0405] The following example describes the quantification of delivered DNA template on a per cell basis. In this example the DNA that the recombinase is integrating contains a DNA-probe binding site. Following delivery of the recombinase and DNA template to the cells, the recombination is allowed to proceed for 24 hours, after which the cells are quantified and are prepared for quantitative fluorescence in situ hybridization (Q-FISH). Q-FISH is conducted using FISH Tag DNA Orange Kit, with Alex Fluor 555 dye (ThermoFisher catalog number F32948). Briefly, a DNA probe that binds to the DNA-probe binding site on the DNA template is generated through a procedure of nick translation, dye labeling, and purification as described in the Kit manual. The cells are then labeled with the DNA probe as described in the Kit manual. The cells are imaged on a Zeiss LSM 710 confocal microscope with a 63× oil immersion objective while maintained at 37 C and 5% CO2. The DNA probe is subjected to 555 nm laser excitation to stimulate Alexa Flour. A MATLAB script is written to measure the Alex Fluor intensity relative to a standard generated with known quantities of DNA. Using this method, the amount of template DNA delivered to a cell is determined.

qPCR

[0406] The following example describes the quantification of delivered DNA template on a per cell basis. In this example the DNA that the recombinase is integrating contains a DNA-probe binding site. Following delivery of the recombinase and DNA template to the cells, the recombination is allowed to proceed for 24 hours after which the cells are quantified, and cells are prepared for quantitative PCR (qPCR). qPCR is conducted using standard kits for this protocol, such as the ThermoFisher TaqMan product (https://www.thermofisher.com/us/en/home/life-science/pcr/real-time-pcr/real-time-pcr-assays-search.html). Briefly, primers are designed that specifically amplify a region of the delivered template DNA as well as probes for the specific amplicon. A standard curve is generated by using a serial dilution of quantified pure template DNA to correlate threshold Ct numbers to number of DNA templates. The DNA is then extracted from the cells being analyzed and input into the qPCR reaction along with all additional components per the manufacturer's directions. The samples are than analyzed on an appropriate qPCR machine to determine the Ct number, which is then mapped to the standard curve for absolute quantification. Using this method, the amount of template DNA delivered to a cell is determined.

### Example 8: Intracellular Ratio of DNA: Recombinase

[0407] The following example describes the determination of the ratio of recombinase protein to template DNA cell in the target cells. Following delivery of the recombinase and DNA template to the cells, the recombination is allowed to proceed for 24 hours after which the cells are quantified, and cells are prepared quantification of the recombinase and of the template DNA as outlined in the above examples. These two values (recombinase per cell and template DNA per cell) are then divided (recombinase per cell/template DNA per cell) to determine the bulk average ratio of these quantities. Using this method, the ratio of recombinase to template DNA delivered to a cell is determined.

### Example 9: Activity in Presence of DNA-Damage Response Inhibiting Agents—Activity in Presence of NHEJ Inhibitor

[0408] The following example describes the assaying of activity of the recombinase protein in the presence of inhibitors of non-homologous end joining to highlight the lack of dependence on the expression of the proteins involved in these pathways for activity of the recombinase. Briefly, the assay outlined to determine efficiency of recombinase activity outlined in the example above is performed. However, in this case two separate experiments are performed.

[0409] In experiment 1, 24 hours after delivery of the recombinase and Template DNA, 1 μM of the NHEJ inhibitor Scr7 (https://www.sigmaaldrich.com/catalog/product/sigma/sml1546?lang=en&region=US) is added to the cell growth media to inhibit this pathway. All other elements of the protocol are identical.

[0410] In experiment 2, the cells are manipulated identically as in experiment 1 but no inhibitor is added to the media. Both experiments are analyzed for efficiency per the example above and the % inhibited activity relative to uninhibited activity is determined.

### Example 10: Activity in Presence of DNA-Damage Response Inhibiting Agents—Activity in Presence of HDR Inhibitor

[0411] The following example describes the assaying of activity of the recombinase protein in the presence of inhibitors of homologous recombination to highlight the lack of dependence on the expression of the proteins involved in these pathways for activity of the recombinase. Briefly, the assay outlined to determine efficiency of recombinase activity outlined in the example above is performed. However, in this case, two separate experiments are performed.

[0412] In experiment 1: 24 hours after delivery of the recombinase and Template DNA, 1 μM of the HR inhibitor B02 (https://www.selleckchem.com/products/b02.html) is added to the cell growth media to inhibit this pathway. All other elements of the protocol are identical.

[0413] In experiment 2: the cells are manipulated identically as in experiment 1 but no inhibitor is added to the media. Both experiments are analyzed for efficiency per the example above and the % inhibited activity relative to uninhibited activity is determined.

### Example 11: Percentage of Nuclear Versus Cytoplasmic Recombinase

[0414] The following example describes the determination of the ratio of recombinase protein in the nucleus vs the cytoplasm of target cells. 12 hours following delivery of the recombinase and DNA template to the cells as described herein, the cells are quantified and prepared for analysis. The cells are split into nuclear and cytoplasmic fractions using the following standard kits, following manufacturer directions: NE-PER Nuclear and Cytoplasmic Extraction by ThermoFisher. Both the cytoplasmic and nuclear fractions are kept and then put through the mass spec based recombinase quantification assay outlined in the example above. Using this method, the ratio of nuclear recombinase to cytoplasmic recombinase in the cells is determined.

### Example 12: Delivery to Plant Cells

[0415] This example illustrates a method of delivering at least one recombinase to a plant cell wherein the plant cell is located in a plant or plant part. More specifically, this example describes delivery of a Gene Writing recombinase and its template DNA to a non-epidermal plant cell (i.e., a cell in a soybean embryo), in order to edit an endogenous plant gene (i.e., phytoene desaturase, PDS) in germline cells of excised soybean embryos. This example describes delivery of polynucleotides encoding the delivered transgene through multiple barriers (e.g., multiple cell layers, seed coat, cell walls, plasma membrane) directly into soybean germline cells, resulting in a heritable alteration of the target nucleotide sequence, PDS. The methods described do not employ the common techniques of bacterially mediated transformation (e.g., by Agrobacterium sp.) or biolistics.

[0416] Plasmids are designed for delivery of recombinase and a single template DNA targeting the endogenous phytoene desaturase (PDS) in soybean (Glycine max). It will be apparent to one skilled in the art that analogous plasmids are easily designed to encode other recombinases and template DNA sequences, optionally including different elements (e. g., different promoters, terminators, selectable or detectable markers, a cell-penetrating peptide, a nuclear localization signal, a chloroplast transit peptide, or a mitochondrial targeting peptide, etc.), and used in a similar manner.

[0417] In a first series of experiments, these vectors are delivered to non-epidermal plant cells in soybean embryos using combinations of delivery agents and electroporation. Mature, dry soybean seeds (cv. Williams 82) are surface-sterilized as follows. Dry soybean seeds are held for 4 hours in an enclosed chamber holding a beaker containing 100 milliliters 5% sodium hypochlorite solution to which 4 milliliters hydrochloric acid are freshly added. Seeds remain desiccated after this sterilization treatment. The sterilized seeds are split into 2 halves by manual application of a razor blade and the embryos are manually separated from the cotyledons. Each test or control treatment is carried out on 20 excised embryos. The following series of experiments is then performed.

Experiment 1: A delivery solution containing the vectors (100 nanograms per microliter of each plasmid) in 0.01% CTAB (cetyltrimethylammonium bromide, a quaternary ammonium surfactant) in sterile-filtered milliQ water is prepared. Each solution is chilled to 4 degrees Celsius and 500 microliters are added directly to the embryos, which are then immediately placed on ice in a vacuum chamber and subjected to a negative pressure (2×10″3 millibar) treatment for 15 minutes. Following the chilling/negative pressure treatments, the embryos are treated with electric current using a BTX-Harvard ECM-830 electroporation device set with the following parameters: 50V, 25 millisecond pulse length, 75 millisecond pulse interval for 99 pulses.
Experiment 2: conditions identical to Experiment 1, except that the initial contacting with delivery solution and negative pressure treatments are carried out at room temperature.
Experiment 3: conditions identical to Experiment 1, except that the delivery solution is prepared without CTAB but includes 0.1% Silwet L-77™ (CAS Number 27306-78-1, available from Momentive Performance Materials, Albany, N.Y). Half (10 of 20) of the embryos receiving each treatment undergo electroporation, and the other half of the embryos do not.
Experiment 4: conditions identical to Experiment 3, except that several delivery solutions are prepared, where each further includes 20 micrograms/milliliter of one single-walled carbon nanotube preparation selected from those with catalogue numbers 704113, 750530, 724777, and 805033, all obtainable from Sigma-Aldrich, St. Louis, Mo. Half (10 of 20) of the embryos receiving each treatment undergo electroporation, and the other half of the embryos do not.
Experiment 5: conditions identical to Experiment 3, except that the delivery solution further includes 20 micrograms/milliliter of triethoxylpropylaminosilane-functionalized silica nanoparticles (catalogue number 791334, Sigma-Aldrich, St. Louis, Mo. Half (10 of 20) of the embryos receiving each treatment undergo electroporation, and the other half of the embryos do not.
Experiment 6: conditions identical to Experiment 3, except that the delivery solution further includes 9 micrograms/milliliter branched polyethylenimine, molecular weight −25,000 (CAS Number 9002-98-6, catalogue number 408727, Sigma-Aldrich, St. Louis, Mo.) or 9 micro grams/milliliter branched polyethylenimine, molecular weight −800 (CAS Number 25987-06-8, catalogue number 408719, Sigma-Aldrich, St. Louis, Mo.). Half (10 of 20) of the embryos receiving each treatment undergo electroporation, and the other half of the embryos do not.
Experiment 7: conditions identical to Experiment 3, except that the delivery solution further includes 20% v/v dimethylsulf oxide (DMSO, catalogue number D4540, Sigma-Aldrich, St. Louis, Mo.). Half (10 of 20) of the embryos receiving each treatment undergo electroporation, and the other half of the embryos do not.
Experiment 8: conditions identical to Experiment 3, except that the delivery solution further contains 50 micromolar nono-arginine (RRRRRRRRR, SEQ ID NO:1873). Half (10 of 20) of the embryos receiving each treatment undergo electroporation, and the other half of the embryos do not.
Experiment 9: conditions identical to Experiment 3, except that following the vacuum treatment, the embryos and treatment solutions are transferred to microcentrifuge tubes and centrifuged 2, 5, 10, or 20 minutes at 4000×g. Half (10 of 20) of the embryos receiving each treatment undergo electroporation, and the other half of the embryos do not.
Experiment 10: conditions identical to Experiment 3, except that following the vacuum treatment, the embryos and treatment solutions are transferred to microcentrifuge tubes and centrifuged 2, 5, 10, or 20 minutes at 4000×g.
Experiment 11: conditions identical to Experiment 4, except that following the vacuum treatment, the embryos and treatment solutions are transferred to microcentrifuge tubes and centrifuged 2, 5, 10, or 20 minutes at 4000×g.
Experiment 12: conditions identical to Experiment 5, except that following the vacuum treatment, the embryos and treatment solutions are transferred to microcentrifuge tubes and centrifuged 2, 5, 10, or 20 minutes at 4000×g.

[0418] After the delivery treatment, each treatment group of embryos is washed 5 times with sterile water, transferred to a petri dish containing ½ MS solid medium (2.165 g Murashige and Skoog medium salts, catalogue number MSP0501, Caisson Laboratories, Smithfield, Utah), 10 grams sucrose, and 8 grams Bacto agar, made up to 1.00 liter in distilled water), and placed in a tissue culture incubator set to 25 degrees Celsius. After the embryos have elongated, developed roots and true leaves have emerged, the seedlings are transferred to soil and grown out. Modification of all endogenous PDS alleles results in a plant unable to produce chlorophyll and having a visible bleached phenotype. Modification of a fraction of all endogenous PDS alleles results in plants still able to produce chlorophyll; plants that are heterozygous for an altered PDS gene will are grown out to seed and the efficiency of heritable genome modification is determined by molecular analysis of the progeny seeds.

### Example 13: Assessment of Gene Writer Activity in Human Cells by Episomal Reporter Inversion Assay

[0419] This example describes a reporter assay for Gene Writer activity in human cells. Specifically, the reporter assay involves the co-delivery of an inactive reporter plasmid and a second plasmid bearing a tyrosine recombinase that may activate an inverted GFP gene on the reporter plasmid.

[0420] In this example, a Gene Writer and a reporter were delivered to HEK293T cells. The delivery comprised two plasmids: 1) the recombinase expression plasmid encoding a recombinase sequence (e.g., a recombinase from Table 1, recombinase sequence from Table 2) driven by the mammalian CMV promoter, and 2) the reporter plasmid comprising a CMV promoter upstream of a recombinase target site flanked inverted EGFP sequence (e.g., an inverted EGFP sequence flanked by a pair of recognition sites from Column 2 or 3 of Table 1, in inverted orientation relative to each other). Tyrosine recombinases that were discovered as described elsewhere herein and that recognize palindromic sequences with homology to the human genome, comprising up to 3 mismatches, were selected for activity testing on both their natural sequences (e.g., natural sequences as discovered in bacteria, e.g., as describe in Column 2 of Table 1) as well as the corresponding human genome sequence (containing up to 3 mismatches, e.g., as described in Column 3 of Table 1). The presence of a cognate recombinase results in inversion of the EGFP sequence and allows EGFP expression driven by the CMV promoter, e.g., as shown in the schematic in FIG. 1.

[0421] Approximately 120,000 HEK293T cells were either co-transfected with recombinase expressing plasmid and inverted GFP reporter plasmid at a 1:3 recombinase:reporter plasmid molar ratio using TransIT-293 Reagent (Mirusbio), or transfected similarly with reporter plasmid alone as a negative control. Two days after transfection, recombinase activity was measured using flow cytometry to determine the percentage of EGFP positive cells. Results of flow cytometry analysis are provided in Table 16, and show that a recombinase with activity in human cells resulted in an increase in the percentage of EGFP positive cells over the negative control (reporter plasmid only).

### Example 14: Assessment of Gene Writer Activity in Human Cells by Integration at Endogenous Genomic Loci

[0422] This example describes an integration assay for Gene Writer activity in human cells. Specifically, the assay involves the co-delivery of an insert DNA plasmid comprising a heterologous object sequence and a recombinase recognition site and a second plasmid bearing a tyrosine recombinase for catalyzing the integration of the insert DNA plasmid into the genome.

[0423] In this example, a Gene Writer and a sequence of interest were delivered to HEK293T cells. The delivery comprised two plasmids: 1) the recombinase expression plasmid harboring a recombinase sequence (e.g., a recombinase from Table 1, recombinase sequence from Table 2) driven by the mammalian CMV promoter, and 2) the insert DNA plasmid comprising a CMV promoter upstream of a gene of interest (e.g., a GFP sequence) and a native recombinase recognition site (e.g., a sequence of Column 2 of Table 1) or a recombinase recognition site matching a sequence in the human genome, e.g., a sequence in the human genome with homology to the native recognition site (e.g., a sequence of Column 3 of Table 1), with three or fewer mismatches. An example integration reaction is shown in FIG. 2.

[0424] Approximately 120,000 HEK293T cells were either co-transfected with recombinase expressing plasmid and insert DNA plasmid at a 1:3 recombinase:insert DNA plasmid molar ratio using TransIT-293 Reagent (Mirusbio), or transfected similarly with reporter plasmid alone as a negative control. At 2-5 days post-transfection, recombinase-mediated genome integration was measured using Droplet Digital PCR (ddPCR). The percentage of cells undergoing successful integration was approximated by calculating the average genomic copy number of insert DNA integrants normalized to an RPP30 reference control. Results of ddPCR analysis are provided in Table 16, and shows that a recombinase able to integrate the insert DNA plasmid into the human genome resulted in an increase in the average number of integration events per genome over the negative control (reporter plasmid only).

### Example 15: Inversion and Integration Assay Data

[0425] Recombinases from Table 1 or 2 were tested in human cells using an episomal reporter inversion (Example 13) or genomic integration (Example 14) assay and the data is shown in Table 16. Column 2 indicates the accession of recombinase proteins as listed in Tables 1 and 2. For the episomal assay, inversion activity is shown as % of GFP+ cells as measured by flow cytometry, where Column 4 indicates inversion activity using the natural recognition sites (Column 2 of Table 1) and Column 6 indicates inversion activity using the closest matching human site (Column 3 of Table 1), with Columns 3 and 5 displaying the respective background GFP in the absence of recombinase. For the genomic integration assay, integration activity measured by ddPCR is expressed as % of cells estimated by the average copies of integrated insert DNA vector per genome copy and is shown in Column 7. Of the exemplary recombinases listed in Table 16, at least 34 showed activity above background using the closest matching human site in the episomal reporter inversion assay. Of these, at least 21 showed activity that was at least twice the background level using the closest matching human site. Of the exemplary recombinases listed in Table 16 that were tested by genomic integration assay, at least 17 showed activity at the closest matching site in the human genome. NT=Not Tested

TABLE 16
Recombinase activity in human cells.

| | | 3. | 4. | 5. | 6. | |
|---|---|---|---|---|---|---|
| 1. | 2. | GFP Neg | GFP+ Rec | GFP Neg | GFP+ Rec | 7. |
| Recombinase | Protein_ID | (Natural) | (Natural) | (Human) | (Human) | Integration |
| Rec1 | WP_010497271.1 | 8.22 | 9.77 | 7.25 | 7.965 | NT |
| Rec2 | WP_006717173.1 | 0.2565 | 0.133 | 2.27 | 0.88 | NT |
| Rec3 | WP_006718580.1 | 0.2565 | 0.096 | 2.27 | 0.75 | NT |
| Rec4 | WP_006719234.1 | 0.2565 | 0.1335 | 2.27 | 0.55 | NT |
| Rec5 | WP_109859198.1 | 0.265 | 0.195 | 2.27 | 0.545 | NT |
| Rec2 | WP_006717173.1 | 0.265 | 0.27 | 2.27 | 0.76 | NT |
| Rec6 | WP_006717195.1 | 0.2565 | 0.135 | 2.27 | 0.705 | NT |
| Rec7 | WP_005715799.1 | 0.2565 | 0.108 | 2.27 | 0.78 | NT |
| Rec8 | WP_017740000.1 | 0.264 | 0.1645 | 0.165 | 0.047 | NT |
| Rec9 | WP_017744257.1 | 0.264 | 0.1325 | 0.165 | 0.05 | NT |
| Rec10 | WP_017746151.1 | 0.264 | 0.1675 | 0.165 | 0.047 | NT |
| Rec11 | WP_038150996.1 | 0.07465 | 0.02366 | 1.8875 | 3.065 | NT |
| Rec12 | WP_038150898.1 | 0.07465 | 0.031 | 1.8875 | 2.715 | NT |
| Rec13 | WP_126045042.1 | 5.795 | 4.465 | 4.085 | 9.235 | NT |
| Rec14 | WP_061329756.1 | 1.04 | 1.18 | 4.085 | 1.715 | NT |
| Rec15 | XP_012333305.1 | 2.178 | 5.905 | 3.435 | 7.24 | NT |
| Rec16 | WP_120166565.1 | 4.755 | 7.985 | 6.21 | 11.42 | NT |
| Rec17 | WP_073025039.1 | 4.4 | 8.625 | 3.355 | 68.4 | 0.15 |
| Rec18 | WP_007635552.1 | 1.255 | 0.202 | 3.355 | 1.045 | NT |
| Rec19 | WP_058958135.1 | 0.0065 | 63.65 | 6.21 | 54.8 | 0.86 |
| Rec20 | WP_090967054.1 | 4.93 | 70.65 | 6.21 | 63.55 | 0.54 |
| Rec21 | WP_010365336.1 | 4.91 | 4.75 | 3.355 | 0.98 | NT |
| Rec22 | WP_016392893.1 | 1.66 | 1.45 | 10.985 | 11.49 | NT |
| Rec23 | WP_047824597.1 | 0.81 | 43.3 | 0.188665 | 9.96 | 0 |
| Rec24 | WP_046407494.1 | 2.34 | 17.1 | 6.505 | 11.7 | NT |
| Rec25 | WP_003712523.1 | 3.3 | 4.845 | 0.1935 | 0.275 | NT |
| Rec26 | WP_005027658.1 | 3.98 | 4.115 | 1.475 | 2.05 | NT |
| Rec27 | WP_021170377.1 | 6.51 | 62.7 | 1.2395 | 45.2 | 0.87 |
| Rec28 | WP_015169902.1 | 6.76 | 10.165 | 3.705 | 4.62 | NT |
| Rec29 | WP_089415106.1 | 1.305 | 36.85 | 2.215 | 30.9 | 0.28 |
| Rec30 | WP_022624268.1 | 1.305 | 32.1 | 2.215 | 32.35 | 0.27 |
| Rec31 | WP_046103089.1 | 1.305 | 21.3 | 2.215 | 5.185 | 0.25 |
| Rec32 | WP_069027120.1 | 6.6 | 60.05 | 2.215 | 38.25 | 0.14 |
| Rec33 | WP_010671927.1 | 6.6 | 50.95 | 2.215 | 28.3 | 0.09 |
| Rec34 | WP_109653747.1 | 6.6 | 50.65 | 2.215 | 28.65 | 0.24 |
| Rec35 | WP_134161939.1 | 6.6 | 51.95 | 2.215 | 34.15 | 0.63 |
| Rec36 | WP_111534863.1 | 6.6 | 44.2 | 2.215 | 28.25 | 0.26 |
| Rec37 | WP_128085508.1 | 6.6 | 40 | 2.215 | 15.85 | 0.36 |
| Rec38 | WP_115764642.1 | 6.6 | 44.45 | 2.215 | 30.8 | 0.06 |
| Rec39 | WP_11H38305.1 | 6.6 | 42 | 2.215 | 14.845 | 0.33 |
| Rec82 | WP_056773790.1 | 5.03 | 59 | 3.47 | 5.625 | NT |
| Rec83 | WP_033768926.1 | 5.425 | 65.2 | 3.47 | 4.43 | NT |
| Rec142 | WP_048474244.1 | 4.4 | 20.25 | 0.9 | 0.325 | NT |
| Rec338 | PKP94160.1 | 12.9 | 39.1 | 1.345 | 25.05 | 0.09 |
| Rec349 | WP_047138903.1 | 2.655 | 3.105 | 1.815 | 1.17 | NT |
| Rec432 | WP_016115818.1 | 10.65 | 7.59 | 3.03 | 1.015 | NT |
| Rec476 | WP_037412868.1 | 10.255 | 9.875 | 3.995 | 3.94 | NT |
| Rec480 | WP_066605681.1 | 0.49 | 0.375 | 0.65 | 0.245 | NT |
| Rec483 | WP_040041154.1 | 3.015 | 3.625 | 1.45 | 1.33 | NT |
| Rec507 | WP_132978117.1 | 13.7 | 21.4 | 7.485 | 6.63 | NT |
| Rec521 | WP_111480623.1 | 7.83 | 57.3 | 8.22 | 7.42 | NT |
| Rec522 | WP_125440609.1 | 7.83 | 29.265 | 7.115 | 8.435 | NT |
| Rec523 | WP_065235645.1 | 9.44 | 46.5 | 4.3 | 2.39 | NT |
| Rec554 | WP_076797908.1 | 3.02 | 2.495 | 5.76 | 3.55 | NT |
| Rec555 | WP_097452609.1 | 1.23 | 47 | 9.2 | 10.525 | NT |
| Rec589 | WP_026351576.1 | NT | NT | 5.945 | 36.65 | 0.12 |
| Rec590 | WP_092743158.1 | NT | NT | 5.945 | 27.45 | NT |

### Example 16: Dual AAV Delivery of Tyrosine Recombinase and Template DNA to Mammalian Cells

[0426] This example describes the use of a tyrosine recombinase based Gene Writer system for the targeted integration of a template DNA into the human genome. More specifically, a recombinase, e.g., a tyrosine recombinase with an amino acid sequence from Table 1 or 2, and a template DNA comprising the associated recognition site, e.g., a sequence from Column 2 or 3 of Table 1, are co-delivered to HEK293T cells as separate AAV viral vectors to insert DNA precisely and efficiently in a mammalian cell genome comprising a cognate recognition site, e.g., a sequence from Column 3 of Table 1.

[0427] Two transgene configurations are assessed to determine the integration, stability, and expression using different AAV insert DNA formats: 1) template comprising a single recognition site that utilizes formation of double-stranded circularized DNA following AAV transduction in the cell nucleus; or 2) template comprising two same orientation recognition sites flanking the desired insert sequence, e.g., two copies of a recognition sequence from Column 2 or Column 3 of Table 1 in the same orientation, that can first be excised from the AAV genome by the recombinase for circularization followed by integration into the mammalian genome.

[0428] Adeno-associated viral vectors encoding a recombinase or the corresponding recognition site-containing insert DNA are generated based on the pAAV-CMV-EGFP-WPRE-pA viral backbone (Sirion Biotech), but with replacement of the CMV promoter with the EFla promoter. pAAV-Ef1a-Recombinase-WPRE-pA is generated using a human codon optimized recombinase (GenScript). pAAV-Stuffer insert DNA constructs additionally contain either a 500 bp stuffer sequence between the 5′ AAV2 ITR sequence and Ef1a promoter, or a 500 bp stuffer sequence proximal to the 5′ terminal AAV2 ITR sequence and a 500 bp stuffer sequence proximal to the 3′ AAV2 ITR sequence. The above listed AAV vectors are packaged into AAV2 serotype (Sirion Biotech) at a 10¹³ total vg scale.

[0429] HEK293T cells are seeded in a 48-well plate format at 40,000 cells/well. 24 h later, cells are transduced with either the AAV comprising the recombinase expression vector and the AAV comprising the insert DNA vector, or the AAV comprising the insert DNA vector alone (negative control). On days 3 and 7 post-transduction, genomic DNA is extracted to assess the efficiency of integration using dual AAV delivery of a tyrosine recombinase and an insert DNA vector comprising its recognition site. Integration events are assessed via ddPCR to quantify average integration events (copies/genome) across the cell population to estimate the fraction of cells successfully edited.

### Example 17: In Vitro Combination mRNA and AAV Delivery of a Gene Writing Polypeptide and Template DNA for Site-Specific Integration in Human Cells

[0430] This example describes use of a Gene Writer system for the site-specific insertion of exogenous DNA into the mammalian cell genome. More specifically, a recombinase, e.g., a tyrosine recombinase with an amino acid sequence from Table 1 or 2, and a template DNA comprising the associated recognition site, e.g., a sequence from Column 2 or 3 of Table 1, are introduced into HEK293T cells. In this example, the recombinase is delivered as mRNA encoding the recombinase, and the template DNA is delivered via AAV.

[0431] HEK293T cells are seeded in a 48-well plate format at 40,000 cells/well. 24 h later, cells are transduced with either mRNA encoding the recombinase polypeptide and an AAV comprising the insert DNA vector, or the AAV comprising the insert DNA vector alone (negative control). The timing of delivery is assessed by the following conditions: 1) mRNA delivery of recombinase and AAV delivery of template DNA on the same day, 2) mRNA delivery of recombinase 24 h prior to AAV delivery of template DNA, 3) AAV delivery of template DNA 24 h prior to mRNA delivery of recombinase. Genomic DNA is extracted three days post-transfection of mRNA and post-transduction of AAV to assess the efficiency of integration. Integration efficiency is assessed via ddPCR to quantify average integration events (copies/genome) across the cell population to estimate the fraction of cells successfully edited.

### Example 18: Ex Vivo Combination mRNA and AAV Delivery of a Gene Writing Polypeptide and Template DNA to HSCs for the Treatment of Beta-Thalassemia and Sickle Cell Disease

[0432] This example describes delivery of mRNA encoding a recombinase and AAV template DNA into C34+ cells (hematopoietic stem and progenitor cells) in order to write an actively expressed 7-globin gene cassette to treat genetic mutations that lead to beta-thalassemia and sickle cell disease.

[0433] In this example, AAV6 is used to deliver the template DNA. More specifically, the AAV6 template DNA includes, in order, 5′ ITR, a recombinase recognition site, e.g., a sequence from Column 2 or 3 of Table 1, a pol II promoter, e.g., the human β-globin promoter, a human fetal 7-globin coding sequence, a poly A tail and 3′ITR. Considering the maximum volume limit of electroporation reagents, recombinase mRNA and the AAV6 template are co-delivered into CD34 cells via different conditions, e.g.: 1) AAV6 template and recombinase mRNA are co-electroporated; 2) recombinase mRNA is electroporated 15 mins prior to AAV6 insert DNA transduction.

[0434] After electroporation/transduction, cells are incubated in CD34 maintenance media for 2 days. Then, ˜10% of the treated cells are harvested for genomic DNA isolation to determine integration efficiency. The rest of the cells are transferred to erythroid expansion and differentiation media. After ˜20 days differentiation, three assays are performed to determine the integration of 7-globin after erythroid differentiation: 1) a subset of cells is stained with NucRed (Thermo Fisher Scientific) to determine the enucleation rate; 2) a subset of the cells is stained with fluorescein isothiocyanate (FITC)-conjugated anti-γ-globin antibody (Santa Cruz) to determine the percentage of fetal hemoglobin positive cells; 3) a subset of the cells is harvested for HPLC to determine 7-globin chain expression.

### Example 19: Ex Vivo Delivery of a Gene Writer Polypeptide and Circular DNA Template for Generating CAR-T Cells

[0435] This example describes delivery of a Gene Writing system as a deoxyribonucleoprotein (DNP) to human primary T-cells ex vivo for the generation of CAR-T cells, e.g., CAR-T cells for treating B-cell lymphoma.

[0436] The Gene Writer polypeptide, e.g., recombinase, e.g., recombinase with a sequence from Table 1 or Table 2, is prepared and purified for use directly in its active protein form. For the template component, minicircle DNA plasmids that lack plasmid backbone and bacterial sequences are used in this example, e.g., prepared as according to a method of Chen et al. Mol Ther 8(3):495-500 (2003), wherein a recombination event is first used to excise these extraneous plasmid maintenance functions to minimize plasmid size and cellular response. The first recombination event may be performed by flanking the desired vector sequence with cognate recognition sites positioned in the same orientation, such that in vitro recombination with the cognate recombinase results in the formation of a minicircle template DNA comprising a single copy of the recombinase recognition site and desired sequence for integration, which is purified from the remaining plasmid vector. Template DNA minicircles comprise, in order, a recombinase recognition site, e.g., a sequence from Column 2 or 3 of Table 1, a pol II promoter, e.g., EF-1, a human codon optimized chimeric Antigen Receptor (including an extracellular ligand binding domain, a transmembrane domain, and intracellular signaling domains), e.g., the CD19-specific Hu19-CD828Z (Genbank MN698642; Brudno et al. Nat Med 26:270-280 (2020)) CAR molecule, and a poly A tail. The template DNA is first mixed with purified recombinase protein and incubated at room temperature for 15-30 mins to form DNP complexes. Then, the DNP complex is nucleofected into activated T cells. Integration by the Gene Writer system is assayed using ddPCR for molecular quantification, and CAR expression is measured by flow cytometry.

### Example 20: Production of mRNA Encoding a Gene Writer Polypeptide

[0437] This example describes the generation of a recombinase encoding mRNA by in vitro transcription from a DNA vector. The mRNA template plasmid includes the T7 promoter followed by a 5′UTR, the recombinase coding sequence, a 3′ UTR, and ˜100 nucleotide long poly(A) tail. The plasmid is linearized by enzymatic restriction resulting in blunt end or 5′ overhang downstream of poly(A) tail and used for in vitro transcription (IVT) using T7 polymerase (NEB). Following IVT, the RNA is treated with DNase I (NEB). After buffer exchange, enzymatic capping is performed using Vaccinia capping enzyme (NEB) and 2′-O-methyltransferase (NEB) in the presence of GTP and SAM (NEB). The capped RNA is purified and concentrated using silica columns (for example, Monarch® RNA Cleanup kit) and buffered by 2 mM sodium citrate pH 6.5.

### Example 21: Unidirectional Sequencing Assay for Determination of Integration Site

[0438] This example describes performance of unidirectional sequencing to determine the sequence of an unknown integration site with an unbiased profile of genome wide specificity. Integration experiments are performed as in previous examples by using a Gene Writing system comprising a recombinase and a template DNA for insertion. The recombinase and insert DNA plasmids are transfected into 293T cells. Genomic DNA is extracted at 72 hours post transfection and subjected to unidirectional sequencing according to the following method. First, a next generation library is created by fragmentation of the genomic DNA, end repair, and adaptor ligation. Next, fragmented genomic DNA harboring template DNA integration events is amplified by two-step nested PCR using forward primers binding to template specific sequence and reverse primers binding to sequencing adaptors. PCR products are visualized on a capillary gel electrophoresis instrument, purified, and quantified by Qubit (ThermoFisher). Final libraries are sequenced on a Miseq using 300 bp paired end reads (Illumina). Data analysis is performed by detecting the DNA flanking the insertion and mapping that sequence back to the human genome sequence, e.g., hg38.

### Example 22: Use of Dual AAV Vector for the Treatment of Cystic Fibrosis in CFTR Mouse Model

[0439] This example describes delivery of a Gene Writing system as a dual AAV vector system for the treatment of cystic fibrosis in a mouse model of disease. Cystic fibrosis is a lung disease that is caused by mutations in the CFTR gene, which can be treated by the insertion of the wild-type CFTR gene into the genome of lung cells, such as cells found in the respiratory bronchioles and columnar non-ciliated cells in the terminal bronchiole.

[0440] A Gene Writing polypeptide, e.g., comprising a sequence of Table 1 or Table 2, and a template DNA comprising a cognate recombinase recognition site, e.g., a sequence from Column 2 or 3 of Table 1, are packaged into AAV6 capsids with expression of the polypeptide driven by the CAG promoter, the combination of which has been shown to be effective for high level transduction and expression in murine respiratory epithelial cells according to the teachings of Halbert et al. Hum Gene Ther 18(4):344-354 (2007).

[0441] AAV preparations are co-delivered intranasally to CFTR gene knockout (Cftr^{tm1Unc}) mice (The Jackson Labs) using a modified intranasal administration, as described previously (Santry et al. BMC Biotechnol 17:43 (2017)). Briefly, AAVs are packaged, purified, and concentrated comprising either a recombinase expression cassette or template DNA, comprising the CFTR gene under the control of a pol II promoter, e.g., CAG promoter, and a cognate recombinase recognition site. In some embodiments, the CFTR expression cassette is flanked by the recombinase recognition sites. Prepared AAVs are each delivered at a dose ranging from 1×10¹⁰-1×10¹² vg/mouse using a modified intranasal administration to the CFTR knockout mouse. After one week, lung tissue is harvested and used for genomic extraction and tissue analysis. To measure integration efficiency, CFTR gene integration is quantified using ddPCR to determine the fraction of cells and target sites containing or lacking the insertion. To assay expression from successfully integrated CFTR, tissue is analyzed by immunohistochemistry to determine expression and pathology.

### Example 23: Method of Treating Ornithine Transcarbamylase Deficiency Through the Introduction of Transiently Expressed Integrase

[0442] This example describes the treatment of ornithine transcarbamylase (OTC) deficiency by the delivery and expression of an mRNA encoding a Gene Writer polypeptide, e.g., a recombinase sequence from Table 1 or Table 2, along with the delivery of an AAV providing the template DNA for integration. OTC deficiency is a rare genetic disorder that results in an accumulation of ammonia due to not having efficient breakdown of nitrogen. The accumulation of ammonia leads to hyperammonemia that can be debilitating and in severe cases lethal. The AAV template comprises a wild-type copy of the human OTC gene under the control of a pol II promoter, e.g., ApoE.hAAT, and a cognate recombinase recognition site, e.g., a sequence from Column 2 or 3 or Table 1. In some embodiments, the OTC expression cassette is flanked by the recombinase recognition sites.

[0443] In this example, LNP formulation of recombinase mRNA follows the formulation of LNP-INT-01 (methods taught by Finn et al. Cell Reports 22:2227-2235 (2018), incorporated herein by reference) and template DNA is formulated in AAV2/8 (methods taught by Ginn et al. JHEP Reports (2019), incorporated herein by reference). Briefly, OTC deficiency is restored by treating neonatal Spf^{ash} mice (The Jackson Lab) by injecting LNP formulations (1-3 mg/kg) containing the recombinase mRNA and AAV (1×10¹⁰-1×10¹² vg/mouse) containing the template DNA via the superficial temporal facial vein (Lampe et al. J Vis Exp 93:e52037 (2014)). The Spf^{ash} mouse has some residual mouse OTC activity which, in some embodiments, is silenced by the administration of an AAV that expresses an shRNA against mouse OTC as previously described (Cunningham et al. Mol Ther 19(5):854-859 (2011), the methods of which are incorporated herein by reference). OTC enzyme activity, ammonia levels, and orotic acid are measured as previously described (Cunningham et al. Mol Ther 19(5):854-859 (2011)). After 1 week, mouse livers are harvested and used for gDNA extraction and tissue analysis. The integration efficiency of hOTC is measured by ddPCR on extracted gDNA. Mouse liver tissue is analyzed by immunohistochemistry to confirm hOTC expression.

### Example 24: Use of a Gene Writing to Integrate a Large Payload into Human Cells

[0444] This example describes the recombinase-mediated integration of a large payload into human cells in vitro.

[0445] In this example, the Gene Writer polypeptide component comprises an mRNA encoding a recombinase, e.g., a recombinase sequence of Table 1 or Table 2, and a template DNA comprising: a cognate recombinase recognition site, e.g., a sequence of Column 2 or 3 of Table 1; a GFP expression cassette, e.g., a CMV promoter operably linked to EGFP; and stuffer sequence to bring the total plasmid size to approximately 20 kb.

[0446] Briefly, HEK293T cells are co-electroporated with the recombinase mRNA and large template DNA. After three days, integration efficiency and specificity are measured. In order to measure efficiency of integration, droplet digital PCR (ddPCR) is performed on genomic DNA e.g., as described by Lin et al. Hum Gene Ther Methods 27(5):197-208 (2016), using primer-probe sets that amplify across the junction of integration, e.g., with one primer annealing to the template DNA and the other to an appropriate flanking region of the genome, such that only integration events are quantified. Data are normalized to an internal reference gene, e.g., RPP30, and efficiency is expressed as the average integration events per genome across the population of cells. To measure specificity, integration events in genomic DNA are assessed by unidirectional sequencing to determine genome coordinates, as described in Example 21.

### Example 25: Use of a Gene Writing to Integrate a Bacterial Artificial Chromosome into Human Embryonic Stem Cells Ex Vivo

[0447] This example describes the recombinase-mediated integration of a bacterial artificial chromosome (BAC) into human embryonic stem cells (hESCs).

[0448] BAC vectors are capable of maintaining extremely large (>100 kb) DNA payloads, and thus can carry many genes or complex gene circuits that may be useful in cellular engineering. Though there has been demonstration of their integration into hESCs (Rostovskaya et al. Nucleic Acids Res 40(19):e150 (2012)), this was accomplished using transposons that lack sequence specificity in their integration patterns. This Example describes sequence-specific integration of large constructs.

[0449] In this example, a BAC engineered to carry the desired payload further comprises a recombinase recognition sequence, e.g., a sequence of Column 2 or 3 from Table 1, that enables recognition by the Gene Writer polypeptide, e.g., a recombinase, e.g., a recombinase with a sequence of Table 1 or Table 2. An approximately 150 kb BAC is introduced into hESCs by electroporation or lipofection as per the teachings of Rostovskaya et al. Nucleic Acids Res 40(19):e150 (2012). After three days, integration efficiency and specificity are measured. In order to measure efficiency of integration, droplet digital PCR (ddPCR) is performed on genomic DNA e.g., as described by Lin et al. Hum Gene Ther Methods 27(5):197-208 (2016), using primer-probe sets that amplify across the junction of integration, e.g., with one primer annealing to the template DNA and the other to an appropriate flanking region of the genome, such that only integration events are quantified. Data are normalized to an internal reference gene, e.g., RPP30, and efficiency is expressed as the average integration events per genome across the population of cells. To measure specificity, integration events in genomic DNA are assessed by unidirectional sequencing to determine genome coordinates, as described in Example 21.

The application's sequence listing, which the Patent Office published only in electronic form, follows.

SEQUENCE LISTING (1873 sequences)

SEQ ID NO: 1 - DNA, 32 bp, Aggregatibacter segnis
  modified_base (13)..(20): a, c, t or g
aataaagggaatnnnnnnnnattccctttatt

SEQ ID NO: 2 - DNA, 32 bp, Aggregatibacter segnis; identical to SEQ ID NO: 1
  modified_base (13)..(20): a, c, t or g

SEQ ID NO: 3 - DNA, 32 bp, Aggregatibacter segnis; identical to SEQ ID NO: 1
  modified_base (13)..(20): a, c, t or g

SEQ ID NO: 4 - DNA, 32 bp, Aggregatibacter segnis; identical to SEQ ID NO: 1
  modified_base (13)..(20): a, c, t or g

SEQ ID NO: 5 - DNA, 32 bp, Aggregatibacter segnis; identical to SEQ ID NO: 1
  modified_base (13)..(20): a, c, t or g

SEQ ID NO: 6 - DNA, 32 bp, Aggregatibacter segnis; identical to SEQ ID NO: 1
  modified_base (13)..(20): a, c, t or g

SEQ ID NO: 7 - DNA, 33 bp, Thermohalobacter berrensis
  modified_base (13)..(21): a, c, t or g
tttttttgtattnnnnnnnnnaaaagaaaaaaa

SEQ ID NO: 8 - DNA, 32 bp, Clostridium botulinum
  modified_base (13)..(20): a, c, t or g
tctctatatatannnnnnnntatatatagaga

SEQ ID NO: 9 - DNA, 35 bp, Lactobacillus acidipiscis
  modified_base (14)..(22): a, c, t or g
aaaaataaaactgnnnnnnnnntagttttattttt

SEQ ID NO: 10 - DNA, 31 bp, Veillonella montpellierensis
  modified_base (13)..(19): a, c, t or g
cactgatatatannnnnnntatatatcagtg

SEQ ID NO: 11 - DNA, 31 bp, Veillonella montpellierensis; identical to SEQ ID NO: 10
  modified_base (13)..(19): a, c, t or g

SEQ ID NO: 12 - DNA, 31 bp, Scytonema hofmannii
  modified_base (13)..(19): a, c, t or g
caatttttgaaannnnnnntttcaaaaattg

SEQ ID NO: 13 - DNA, 31 bp, Scytonema hofmannii; identical to SEQ ID NO: 12
  modified_base (13)..(19): a, c, t or g

SEQ ID NO: 14 - DNA, 31 bp, Scytonema hofmannii; identical to SEQ ID NO: 12
  modified_base (13)..(19): a, c, t or g

SEQ ID NO: 15 - DNA, 32 bp, Candidatus Aquarickettsia rohweri
  modified_base (13)..(20): a, c, t or g
taatgttctatannnnnnnntataaaacacta

SEQ ID NO: 16 - DNA, 32 bp, Plasmodium fragile
  modified_base (13)..(20): a, c, t or g
tgcatatacatannnnnnnntatatatatgta

SEQ ID NO: 17 - DNA, 32 bp, Cycloclasticus sp. DSM 27168
  modified_base (13)..(20): a, c, t or g
ttatgtccaatannnnnnnntattggacatag

SEQ ID NO: 18 - DNA, 32 bp, Paraglaciecola psychrophila; identical to SEQ ID NO: 17
  modified_base (13)..(20): a, c, t or g

SEQ ID NO: 19 - DNA, 32 bp, Unknown
  source: /note="Description of Unknown: Type-F symbiont of Plautia stali sequence"
  modified_base (13)..(20): a, c, t or g
tgacttcgtatannnnnnnntatacgaagcca

SEQ ID NO: 20 - DNA, 32 bp, Pantoea sp. OV426; identical to SEQ ID NO: 19
  modified_base (13)..(20): a, c, t or g

SEQ ID NO: 21 - DNA, 32 bp, Pseudoalteromonas citrea
  modified_base (13)..(20): a, c, t or g
taatgtccaatannnnnnnntatcggacataa

SEQ ID NO: 22 - DNA, 33 bp, Pseudomonas plecoglossicida
  modified_base (13)..(21): a, c, t or g
gaccactccagannnnnnnnntctggagtggtg

SEQ ID NO: 23 - DNA, 32 bp, Croceicoccus naphthovorans
  modified_base (13)..(20): a, c, t or g
ggacatgtgatannnnnnnntatcacatgttg

SEQ ID NO: 24 - DNA, 32 bp, Sphingomonas sp.
  modified_base (13)..(20): a, c, t or g
gcactagcgatannnnnnnntatcactagtgc

SEQ ID NO: 25 - DNA, 31 bp, Lactobacillus oris
  modified_base (13)..(19): a, c, t or g
cccctaactagannnnnnntctaattagggg

SEQ ID NO: 26 - DNA, 31 bp, Bilophila wadsworthia
  modified_base (13)..(19): a, c, t or g
cagcctcttagannnnnnntctaaggggctt

SEQ ID NO: 27 - DNA, 33 bp, Sporomusa sp.
  modified_base (13)..(21): a, c, t or g
taactaatgatannnnnnnnntatcactagttg

SEQ ID NO: 28 - DNA, 34 bp, Synechococcus sp. PCC 7502
  modified_base (14)..(21): a, c, t or g
ctaaagtaagagannnnnnnntttcttacttcag

SEQ ID NO: 29 - DNA, 34 bp, Pantoea agglomerans
  modified_base (14)..(21): a, c, t or g
atgacttcgtatannnnnnnntatacgaagtcat

SEQ ID NO: 30 - DNA, 32 bp, Pantoea sp.
  modified_base (13)..(20): a, c, t or g
tgacttcgtatannnnnnnntatacgaagtca

SEQ ID NO: 31 - DNA, 32 bp, Pantoea anthophila; identical to SEQ ID NO: 30
  modified_base (13)..(20): a, c, t or g

SEQ ID NO: 32 - DNA, 32 bp, Pantoea agglomerans; identical to SEQ ID NO: 30
  modified_base (13)..(20): a, c, t or g

SEQ ID NO: 33 - DNA, 32 bp, Pantoea sp.; identical to SEQ ID NO: 30
  modified_base (13)..(20): a, c, t or g

SEQ ID NO: 34 - DNA, 32 bp, Pantoea agglomerans; identical to SEQ ID NO: 30
  modified_base (13)..(20): a, c, t or g

SEQ ID NO: 35 - DNA, 32 bp, Pantoea allii; identical to SEQ ID NO: 30
  modified_base (13)..(20): a, c, t or g

SEQ ID NO: 36 - DNA, 32 bp, Pantoea sp.; identical to SEQ ID NO: 30
  modified_base (13)..(20): a, c, t or g

SEQ ID NO: 37 - DNA, 32 bp, Pantoea deleyi; identical to SEQ ID NO: 30
  modified_base (13)..(20): a, c, t or g

SEQ ID NO: 38 - DNA, 32 bp, Pantoea agglomerans; identical to SEQ ID NO: 30
  modified_base (13)..(20): a, c, t or g

SEQ ID NO: 39 - DNA, 32 bp, Pantoea sp. ARC607; identical to SEQ ID NO: 30
  modified_base (13)..(20): a, c, t or g

SEQ ID NO: 40 - DNA, 33 bp, Mesorhizobium alhagi
  modified_base (13)..(21): a, c, t or g
tcatgtccgatannnnnnnnntaccggacataa

SEQ ID NO: 41 - DNA, 35 bp, Clostridium beijerinckii
  modified_base (14)..(22): a, c, t or g
gatttttttaacannnnnnnnntattataaaaatc

SEQ ID NO: 42 - DNA, 33 bp, Pseudomonas marginalis
  modified_base (13)..(21): a, c, t or g
tgagacgggatannnnnnnnntatcccatctga

SEQ ID NO: 43 - DNA, 33 bp, Pseudomonas sp. ICMP 460; identical to SEQ ID NO: 42
  modified_base (13)..(21): a, c, t or g

SEQ ID NO: 44 - DNA, 32 bp, Lactococcus raffinolactis
  modified_base (13)..(20): a, c, t or g
aagccatagacannnnnnnntgtgtatggctt

SEQ ID NO: 45 - DNA, 31 bp, Sphingomonas sp. PP-CC-3A-396
  modified_base (13)..(19): a, c, t or g
gcttggtgcacannnnnnntgtgacccaagc

SEQ ID NO: 46 - DNA, 33 bp, Vogesella indigofera
  modified_base (13)..(21): a, c, t or g
aaaagcgtgatannnnnnnnntatcacgccttt

SEQ ID NO: 47 - DNA, 32 bp, Sporomusa sphaeroides
  modified_base (13)..(20): a, c, t or g
ccggcgcaaacannnnnnnntgtttgcgccgc

SEQ ID NO: 48 - DNA, 33 bp, Pseudomonas syringae
  modified_base (13)..(21): a, c, t or g
tggcaagctatannnnnnnnntatatcttgcca

SEQ ID NO: 49 - DNA, 33 bp, Xenorhabdus bovienii
  modified_base (13)..(21): a, c, t or g
aaagaagcgatannnnnnnnntatcgctttttt

SEQ ID NO: 50 - DNA, 32 bp, Komagataeibacter sp.
  modified_base (13)..(20): a, c, t or g
ctacttccgatannnnnnnntgtcggaagtag

SEQ ID NO: 51 - DNA, 32 bp, Komagataeibacter saccharivorans; identical to SEQ ID NO: 50
  modified_base (13)..(20): a, c, t or g

SEQ ID NO: 52 - DNA, 32 bp, Unknown; identical to SEQ ID NO: 50
  source: /note="Description of Unknown: Acetobacteraceae sequence"
  modified_base (13)..(20): a, c, t or g

SEQ ID NO: 53 - DNA, 32 bp, Komagataeibacter medellinensis; identical to SEQ ID NO: 50
  modified_base (13)..(20): a, c, t or g

SEQ ID NO: 54 - DNA, 32 bp, Kozakia baliensis; identical to SEQ ID NO: 50
  modified_base (13)..(20): a, c, t or g

SEQ ID NO: 55 - DNA, 34 bp, Deinococcus swuensis
  modified_base (14)..(21): a, c, t or g
tctatatcccatannnnnnnntataggatataga

SEQ ID NO: 56 - DNA, 33 bp, Bifidobacterium longum
  modified_base (13)..(21): a, c, t or g
attagtcccacannnnnnnnntgtgtgactact

SEQ ID NO: 57 - DNA, 35 bp, Hymenobacter psychrotolerans
  modified_base (14)..(22): a, c, t or g
tttaggtatcatannnnnnnnntatgatgcctaaa

SEQ ID NO: 58 - DNA, 32 bp, Unknown
  source: /note="Description of Unknown: Unclassified Variovorax sequence"
  modified_base (13)..(20): a, c, t or g
ttaggtctcatannnnnnnntatgagacctta

SEQ ID NO: 59 - DNA, 31 bp, Vibrio sp.
  modified_base (13)..(19): a, c, t or g
tcactgtccatannnnnnncatggacagtga

SEQ ID NO: 60 - DNA, 32 bp, Marinobacter similis
  modified_base (13)..(20): a, c, t or g
caatgtccaatannnnnnnntattggacatta

SEQ ID NO: 61 - DNA, 32 bp, Colwellia psychrerythraea
  modified_base (13)..(20): a, c, t or g
ctatgtccgatannnnnnnntattggacatag

SEQ ID NO: 62 - DNA, 32 bp, Colwellia sp.; identical to SEQ ID NO: 61
  modified_base (13)..(20): a, c, t or g

SEQ ID NO: 63 - DNA, 32 bp, Colwellia sp. PAMC 20917; identical to SEQ ID NO: 61
  modified_base (13)..(20): a, c, t or g

SEQ ID NO: 64 - DNA, 32 bp, Colwellia psychrerythraea; identical to SEQ ID NO: 61
  modified_base (13)..(20): a, c, t or g

SEQ ID NO: 65 - DNA, 32 bp, Colwellia sp.; identical to SEQ ID NO: 61
  modified_base (13)..(20): a, c, t or g

SEQ ID NO: 66 - DNA, 32 bp, Sphingomonas wittichii
  modified_base (13)..(20): a, c, t or g
ttatgtccgatannnnnnnntatcggacatat

SEQ ID NO: 67 - DNA, 32 bp, Tardibacter chloracetimidivorans
  modified_base (13)..(20): a, c, t or g
ttatgtccgatannnnnnnntctcggacataa

SEQ ID NO: 68 - DNA, 32 bp, Sphingobium yanoikuyae; identical to SEQ ID NO: 67
  modified_base (13)..(20): a, c, t or g

SEQ ID NO: 69 - DNA, 32 bp, Burkholderia cenocepacia
  modified_base (13)..(20): a, c, t or g
gcttgcgacatannnnnnnntatgtcgcaaac

SEQ ID NO: 70 - DNA, 32 bp, Moraxella bovoculi
  modified_base (13)..(20): a, c, t or g
tttgttggtatannnnnnnntataccaacaaa

SEQ ID NO: 71 - DNA, 33 bp, Marinibacterium profundimaris
  modified_base (13)..(21): a, c, t or g
ctatgtccaatannnnnnnnntattggacatga

SEQ ID NO: 72 - DNA, 31 bp, Desulfuromonas sp.
  modified_base (13)..(19): a, c, t or g
tcagccggaagannnnnnntcttgcggctgc

SEQ ID NO: 73 - DNA, 32 bp, Thermomonospora curvata
  modified_base (13)..(20): a, c, t or g
aaaccctacagannnnnnnntctgtagggtta

SEQ ID NO: 74 - DNA, 32 bp, Thermomonospora curvata; identical to SEQ ID NO: 73
  modified_base (13)..(20): a, c, t or g

SEQ ID NO: 75 - DNA, 33 bp, Pseudomonas sp. 34 E 7
  modified_base (13)..(21): a, c, t or g
ttaggtctgatannnnnnnnntatccgacccaa

SEQ ID NO: 76 - DNA, 33 bp, Pseudomonas fuscovaginae
  modified_base (13)..(21): a, c, t or g
tcacatgggatannnnnnnnntaccccgtgtga

SEQ ID NO: 77 - DNA, 33 bp, Pseudomonas asplenii; identical to SEQ ID NO: 76
  modified_base (13)..(21): a, c, t or g

SEQ ID NO: 78 - DNA, 32 bp, Caulobacter henricii
  modified_base (13)..(20): a, c, t or g
tcatcgtacatannnnnnnntatgtatgatga

SEQ ID NO: 79 - DNA, 33 bp, Pantoea vagans
  modified_base (13)..(21): a, c, t or g
tatgactccagannnnnnnnntctggagtcaca

SEQ ID NO: 80 - DNA, 33 bp, Rahnella sp.; identical to SEQ ID NO: 79
  modified_base (13)..(21): a, c, t or g

SEQ ID NO: 81 - DNA, 33 bp, Pantoea agglomerans; identical to SEQ ID NO: 79
  modified_base (13)..(21): a, c, t or g

SEQ ID NO: 82 - DNA, 33 bp, Pantoea agglomerans
  modified_base (13)..(21): a, c, t or g
tgtgactccagannnnnnnnntctggagtcata

SEQ ID NO: 83 - DNA, 33 bp, Serratia sp. Leaf51; identical to SEQ ID NO: 82
  modified_base (13)..(21): a, c, t or g

SEQ ID NO: 84 - DNA, 33 bp, Pseudomonas aeruginosa
  modified_base (13)..(21): a, c, t or g
ttaagtctgatannnnnnnnntatccgacctaa

SEQ ID NO: 85 - DNA, 33 bp, Pseudomonas aeruginosa; identical to SEQ ID NO: 84
  modified_base (13)..(21): a, c, t or g

SEQ ID NO: 86 - DNA, 32 bp, Pasteurella multocida
  modified_base (13)..(20): a, c, t or g
ttgcaaggaacannnnnnnntgctccttgcat

SEQ ID NO: 87 - DNA, 32 bp, Unknown; identical to SEQ ID NO: 86
  source: /note="Description of Unknown: Pasteurellaceae sequence"
  modified_base (13)..(20): a, c, t or g

SEQ ID NO: 88 - DNA, 35 bp, Lysinibacillus fusiformis
  modified_base (15)..(21): a, c, t or g
cttattaattaatannnnnnntattaattaataag

SEQ ID NO: 89 - DNA, 33 bp, Acidovorax cattleyae
  modified_base (13)..(21): a, c, t or g
tcactcacgatannnnnnnnntatcgtgggtaa

SEQ ID NO: 90 - DNA, 33 bp, Acidovorax sp. Root217
  modified_base (13)..(21): a, c, t or g
ttacccacgatannnnnnnnntatcgtgggtaa

SEQ ID NO: 91 - DNA, 33 bp, Acidovorax sp. Root219; identical to SEQ ID NO: 90
  modified_base (13)..(21): a, c, t or g

SEQ ID NO: 92 - DNA, 31 bp, Burkholderia cenocepacia
  modified_base (13)..(19): a, c, t or g
tacggggaaagannnnnnntctttccccgtt

SEQ ID NO: 93 - DNA, 33 bp, Thermobaculum terrenum
  modified_base (13)..(21): a, c, t or g
tcaagatgaacannnnnnnnntgtttatcttga

SEQ ID NO: 94 - DNA, 33 bp, Thermobaculum terrenum ATCC BAA-798; identical to SEQ ID NO: 93
  modified_base (13)..(21): a, c, t or g

SEQ ID NO: 95 - DNA, 32 bp, Candidatus Protochlamydia naegleriophila
  modified_base (13)..(20): a, c, t or g
ttaacttgaatannnnnnnncattcaagctaa

SEQ ID NO: 96 - DNA, 34 bp, Lactobacillus floricola
  modified_base (14)..(21): a, c, t or g
aatcgttgatatannnnnnnntatattaacgttt

SEQ ID NO: 97 - DNA, 32 bp, Bacillus azotoformans
  modified_base (13)..(20): a, c, t or g
aacaagagcagannnnnnnncctgctcttgct

SEQ ID NO: 98 - DNA, 36 bp, Streptococcus pneumoniae
  modified_base (15)..(22): a, c, t or g
tgagtatttatatannnnnnnntatgtaaatactca

SEQ ID NO: 99 - DNA, 31 bp, Vibrio splendidus
  modified_base (13)..(19): a, c, t or g
tgatcgataacannnnnnntgttatcgatta

SEQ ID NO: 100 - DNA, 33 bp, Aromatoleum aromaticum
  modified_base (13)..(21): a, c, t or g
ttacattcgatannnnnnnnntatcggatgtaa

SEQ ID NO: 101 - DNA, 33 bp, Candidatus Pelagibacter sp. IMCC9063
  modified_base (13)..(21): a, c, t or g
ttacttccgatannnnnnnnntatcggaaatat

SEQ ID NO: 102 - DNA, 32 bp, Mycobacterium phage Milly
  modified_base (13)..(20): a, c, t or g
gccctggtcagannnnnnnntctgaccggggc

SEQ ID NO: 103 - DNA, 33 bp, Streptomyces canus
  modified_base (13)..(21): a, c, t or g
gcgtgacgcagannnnnnnnntctgcgtcacgc

SEQ ID NO: 104 - DNA, 33 bp, Paenibacillus sp. IHBB 10380
  modified_base (13)..(21): a, c, t or g
cacctccaaatannnnnnnnntattaggaggtc

SEQ ID NO: 105 - DNA, 33 bp, Unknown
  source: /note="Description of Unknown: SAR11 cluster bacterium PRT-SC02"
  modified_base (13)..(21): a, c, t or g
ttatttccgatannnnnnnnntatcggaaaaaa

SEQ ID NO: 106 - DNA, 31 bp, Chryseobacterium koreense
  modified_base (13)..(19): a, c, t or g
atctttgtcagannnnnnncccgacaaagat

SEQ ID NO: 107 - DNA, 32 bp, Achromobacter xylosoxidans A8
  modified_base (13)..(20): a, c, t or g
tctatggacatannnnnnnnaatgtccataga

SEQ ID NO: 108 - DNA, 32 bp, Achromobacter xylosoxidans; identical to SEQ ID NO: 107
  modified_base (13)..(20): a, c, t or g

SEQ ID NO: 109 - DNA, 32 bp, Variovorax paradoxus; identical to SEQ ID NO: 107
  modified_base (13)..(20): a, c, t or g

SEQ ID NO: 110 - DNA, 35 bp, Runella sp. HYN0085
  modified_base (14)..(22): a, c, t or g
attagttatgatannnnnnnnntatcgtaagtaat

SEQ ID NO: 111 - DNA, 33 bp, Pseudomonas sp. LS-2
  modified_base (13)..(21): a, c, t or g
tagaaagccatannnnnnnnntatggcttcctg

SEQ ID NO: 112 - DNA, 32 bp, Terriglobus roseus
  modified_base (13)..(20): a, c, t or g
ttacctccgacannnnnnnntgtcgtgggtaa

SEQ ID NO: 113 - DNA, 32 bp, Piscirickettsia salmonis
  modified_base (13)..(20): a, c, t or g
ttacttccgatannnnnnnntatcggaagtac

SEQ ID NO: 114 - DNA, 32 bp, Piscirickettsia salmonis; identical to SEQ ID NO: 113
  modified_base (13)..(20): a, c, t or g

SEQ ID NO: 115 - DNA, 33 bp, Methylobacterium radiotolerans
  modified_base (13)..(21): a, c, t or g
caacgtctgatannnnnnnnntatcagacgtag

SEQ ID NO: 116 - DNA, 33 bp, Methylobacterium radiotolerans; identical to SEQ ID NO: 115
  modified_base (13)..(21): a, c, t or g

SEQ ID NO: 117 - DNA, 33 bp, Methylobacterium radiotolerans; identical to SEQ ID NO: 115
  modified_base (13)..(21): a, c, t or g

SEQ ID NO: 118 - DNA, 33 bp, Methylobacterium organophilum
  modified_base (13)..(21): a, c, t or g
ctacgtctgatannnnnnnnntatcagacgttg

SEQ ID NO: 119 - DNA, 33 bp, Methylobacterium radiotolerans; identical to SEQ ID NO: 118
  modified_base (13)..(21): a, c, t or g

SEQ ID NO: 120 - DNA, 31 bp, Bacillus pumilus
  modified_base (13)..(19): a, c, t or g
aagcatgacacannnnnnncgtgccatgctt

SEQ ID NO: 121 - DNA, 32 bp, Bradyrhizobium canariense
  modified_base (13)..(20): a, c, t or g
taggtattgatannnnnnnntctcactaccta

SEQ ID NO: 122 - DNA, 32 bp, Unknown
  source: /note="Description of Unknown: Clostridiales sequence"
  modified_base (13)..(20): a, c, t or g
aaataccacagannnnnnnntctgcggtactt

SEQ ID NO: 123 - DNA, 33 bp, Pseudomonas fluorescens
  modified_base (13)..(21): a, c, t or g
ttaggttggatannnnnnnnntatcagacctaa

SEQ ID NO: 124 - DNA, 35 bp, Candidatus Pelagibacter sp. TMED142
  modified_base (14)..(22): a, c, t or g
attactattgatannnnnnnnntatcattagtaat

SEQ ID NO: 125 - DNA, 35 bp, Candidatus Pelagibacter ubique; identical to SEQ ID NO: 124
  modified_base (14)..(22): a, c, t or g

SEQ ID NO: 126 - DNA, 33 bp, Enterobacter sp. 638
  modified_base (13)..(21): a, c, t or g
gataacaagatannnnnnnnntatcttgttatc

SEQ ID NO: 127 - DNA, 35 bp, Sphaerochaeta pleomorpha
  modified_base (14)..(22): a, c, t or g
tatccaatgtatannnnnnnnntatacattggata

SEQ ID NO: 128 - DNA, 32 bp, Enterococcus faecium
  modified_base (13)..(20): a, c, t or g
ggaaaacgtagannnnnnnntctacgttttcc

SEQ ID NO: 129 - DNA, 32 bp, Chitinilyticum aquatile
  modified_base (13)..(20): a, c, t or g
ctagtcatgatannnnnnnntatcgtgactat

SEQ ID NO: 130 - DNA, 33 bp, Bacillus sp.
  modified_base (13)..(21): a, c, t or g
ccttaatagacannnnnnnnntatctattaagc

SEQ ID NO: 131 - DNA, 31 bp, Roseburia hominis
  modified_base (13)..(19): a, c, t or g
ggtgcaaccacannnnnnntgtggctgcacc

SEQ ID NO: 132 - DNA, 32 bp, Afipia sp. P52-10
  modified_base (13)..(20): a, c, t or g
ctttcggacagannnnnnnntatgtctgaaag

SEQ ID NO: 133 - DNA, 31 bp, Simiduia agarivorans
  modified_base (13)..(19): a, c, t or g
taatccgtaatannnnnnntttaacggatta

SEQ ID NO: 134 - DNA, 33 bp, Hymenobacter perfusus
  modified_base (13)..(21): a, c, t or g
ttactaccgatannnnnnnnntatcggtactaa

SEQ ID NO: 135 - DNA, 33 bp, Hymenobacter sp. UV11
  modified_base (13)..(21): a, c, t or g
ttagtaccgatannnnnnnnntatcagtactaa

SEQ ID NO: 136 - DNA, 33 bp, Hymenobacter sp. UV11; identical to SEQ ID NO: 135
  modified_base (13)..(21): a, c, t or g

SEQ ID NO: 137 - DNA, 33 bp, Candidatus Pelagibacter sp. TMED203
  modified_base (13)..(21): a, c, t or g
ttttttccgatannnnnnnnntatcggaaatat

SEQ ID NO: 138 - DNA, 31 bp, Providencia sneebia
  modified_base (13)..(19): a, c, t or g
aaagtaccaacannnnnnntgttgatacttt

SEQ ID NO: 139 - DNA, 31 bp, Vibrio cyclitrophicus
  modified_base (13)..(19): a, c, t or g
caaaaggcgacannnnnnntgtcgccttttt

SEQ ID NO: 140 - DNA, 31 bp, Vibrio sp.; identical to SEQ ID NO: 139
  modified_base (13)..(19): a, c, t or g

SEQ ID NO: 141 - DNA, 32 bp, Streptomyces natalensis
  modified_base (13)..(20): a, c, t or g
tgactcctgatannnnnnnntctctggagtca

SEQ ID NO: 142 - DNA, 32 bp, Mycolicibacterium chlorophenolicum
  modified_base (13)..(20): a, c, t or g
ccgtcatggatannnnnnnntatccatgaagc

SEQ ID NO: 143 - DNA, 33 bp, Ruegeria sp. AU67
  modified_base (13)..(21): a, c, t or g
ttacacatgatannnnnnnnntatcatgtgtaa

SEQ ID NO: 144 - DNA, 32 bp, Vibrio splendidus
  modified_base (13)..(20): a, c, t or g
caaaaggcgacannnnnnnntgtcgccttttt

SEQ ID NO: 145 - DNA, 32 bp, Vibrio campbellii; identical to SEQ ID NO: 144
  modified_base (13)..(20): a, c, t or g

SEQ ID NO: 146 - DNA, 32 bp, Vibrio azureus; identical to SEQ ID NO: 144
  modified_base (13)..(20): a, c, t or g

SEQ ID NO: 147 - DNA, 32 bp, Vibrio campbellii; identical to SEQ ID NO: 144
  modified_base (13)..(20): a, c, t or g

SEQ ID NO: 148 - DNA, 32 bp, Vibrio sp. J2-4; identical to SEQ ID NO: 144
  modified_base (13)..(20): a, c, t or g

SEQ ID NO: 149 - DNA, 33 bp, Delftia acidovorans
  modified_base (13)..(21): a, c, t or g
ttgagtgctacannnnnnnnntgtagcactcaa

SEQ ID NO: 150 - DNA, 33 bp, Delftia sp. JD2; identical to SEQ ID NO: 149
  modified_base (13)..(21): a, c, t or g

SEQ ID NO: 151 - DNA, 31 bp, Bacillus loiseleuriae
  modified_base (13)..(19): a, c, t or g
gaacccttgatannnnnnntatcaagggttt

SEQ ID NO: 152 - DNA, 31 bp, Unknown
  source: /note="Description of Unknown: Orbaceae sequence"
  modified_base (13)..(19): a, c, t or g
aacagatcaatannnnnnngattgatctgtt

SEQ ID NO: 153 - DNA, 33 bp, Thioclava dalianensis
  modified_base (13)..(21): a, c, t or g
ttatgtccaatannnnnnnnntatcggacatga

SEQ ID NO: 154 - DNA, 32 bp, Marvinbryantia formatexigens
  modified_base (13)..(20): a, c, t or g
aacaaccacatannnnnnnntatgtggttgtt

SEQ ID NO: 155 - DNA, 33 bp, Unknown
  source: /note="Description of Unknown: Unclassified Pseudomonas sequence"
  modified_base (13)..(21): a, c, t or g
tcagatgggatannnnnnnnntatcccgtgtga

SEQ ID NO: 156 - DNA, 33 bp, Pseudomonas fluorescens; identical to SEQ ID NO: 155
  modified_base (13)..(21): a, c, t or g

SEQ ID NO: 157 - DNA, 33 bp, Unknown; identical to SEQ ID NO: 155
  source: /note="Description of Unknown: Unclassified Pseudomonas sequence"
  modified_base (13)..(21): a, c, t or g

SEQ ID NO: 158 - DNA, 33 bp, Unknown; identical to SEQ ID NO: 155
  source: /note="Description of Unknown: Unclassified Pseudomonas sequence"
  modified_base (13)..(21): a, c, t or g

SEQ ID NO: 159 - DNA, 31 bp, Streptococcus salivarius
  modified_base (13)..(19): a, c, t or g
aaaatagcgatannnnnnntatcgctattat

SEQ ID NO: 160 - DNA, 31 bp, Streptococcus salivarius; identical to SEQ ID NO: 159
  modified_base (13)..(19): a, c, t or g

SEQ ID NO: 161 - DNA, 31 bp, Streptococcus sp. HMSC072D03; identical to SEQ ID NO: 159
  modified_base (13)..(19): a, c, t or g

SEQ ID NO: 162 - DNA, 32 bp, Deinococcus geothermalis
  modified_base (13)..(20): a, c, t or g
ctactccgcagannnnnnnntctgcggagtaa

SEQ ID NO: 163 - DNA, 33 bp, Unknown
  source: /note="Description of Unknown: Bacteroidales sequence"
  modified_base (13)..(21): a, c, t or g
ttagggagaagannnnnnnnntcttctccctac

SEQ ID NO: 164 - DNA, 32 bp, Aeromonas cavernicola
  modified_base (13)..(20): a, c, t or g
caagtatcgatannnnnnnntatcgatactta

SEQ ID NO: 165 - DNA, 32 bp, Aeromonas veronii; identical to SEQ ID NO: 164
  modified_base (13)..(20): a, c, t or g

SEQ ID NO: 166 - DNA, 32 bp, Aeromonas veronii; identical to SEQ ID NO: 164
  modified_base (13)..(20): a, c, t or g

SEQ ID NO: 167 - DNA, 32 bp, Aeromonas veronii; identical to SEQ ID NO: 164
  modified_base (13)..(20): a, c, t or g

SEQ ID NO: 168 - DNA, 32 bp, Aeromonas sp. DNP9; identical to SEQ ID NO: 164
  modified_base (13)..(20): a, c, t or g

SEQ ID NO: 169 - DNA, 32 bp, Aeromonas veronii; identical to SEQ ID NO: 164
  modified_base (13)..(20): a, c, t or g

SEQ ID NO: 170 - DNA, 32 bp, Aeromonas veronii; identical to SEQ ID NO: 164
  modified_base (13)..(20): a, c, t or g

SEQ ID NO: 171 - DNA, 32 bp, Aeromonas veronii; identical to SEQ ID NO: 164
  modified_base (13)..(20): a, c, t or g

SEQ ID NO: 172 - DNA, 32 bp, Aeromonas veronii; identical to SEQ ID NO: 164
  modified_base (13)..(20): a, c, t or g

SEQ ID NO: 173 - DNA, 32 bp, Aeromonas veronii; identical to SEQ ID NO: 164
  modified_base (13)..(20): a, c, t or g

SEQ ID NO: 174 - DNA, 32 bp, Aeromonas veronii; identical to SEQ ID NO: 164
  modified_base (13)..(20): a, c, t or g

SEQ ID NO: 175 - DNA, 32 bp, Aeromonas veronii; identical to SEQ ID NO: 164
  modified_base (13)..(20): a, c, t or g

SEQ ID NO: 176 - DNA, 32 bp, Aeromonas sp. A35_P; identical to SEQ ID NO: 164
  modified_base (13)..(20): a, c, t or g

SEQ ID NO: 177 - DNA, 32 bp, Aeromonas rivipollensis; identical to SEQ ID NO: 164
  modified_base (13)..(20): a, c, t or g

SEQ ID NO: 178 - DNA, 32 bp, Aeromonas dhakensis; identical to SEQ ID NO: 164
  modified_base (13)..(20): a, c, t or g

SEQ ID NO: 179 - DNA, 32 bp, Aeromonas lusitana; identical to SEQ ID NO: 164
  modified_base (13)..(20): a, c, t or g

SEQ ID NO: 180 - DNA, 32 bp, Aeromonas dhakensis; identical to SEQ ID NO: 164
  modified_base (13)..(20): a, c, t or g

SEQ ID NO: 181 - DNA, 32 bp, Aeromonas hydrophila; identical to SEQ ID NO: 164
  modified_base (13)..(20): a, c, t or g

SEQ ID NO: 182 - DNA, 32 bp, Aeromonas dhakensis; identical to SEQ ID NO: 164
  modified_base (13)..(20): a, c, t or g

SEQ ID NO: 183 - DNA, 32 bp, Aeromonas salmonicida; identical to SEQ ID NO: 164
  modified_base (13)..(20): a, c, t or g

SEQ ID NO: 184 - DNA, 32 bp, Aeromonas sanarellii; identical to SEQ ID NO: 164
  modified_base (13)..(20): a, c, t or g

SEQ ID NO: 185 - DNA, 32 bp, Aeromonas hydrophila; identical to SEQ ID NO: 164
  modified_base (13)..(20): a, c, t or g

SEQ ID NO: 186 - DNA, 32 bp, Aeromonas hydrophila; identical to SEQ ID NO: 164
  modified_base (13)..(20): a, c, t or g

SEQ ID NO: 187 - DNA, 32 bp, Aeromonas hydrophila; identical to SEQ ID NO: 164
  modified_base (13)..(20): a, c, t or g

SEQ ID NO: 188 - DNA, 32 bp, Aeromonas salmonicida; identical to SEQ ID NO: 164
  modified_base (13)..(20): a, c, t or g

SEQ ID NO: 189 - DNA, 32 bp, Aeromonas hydrophila; identical to SEQ ID NO: 164
  modified_base (13)..(20): a, c, t or g

SEQ ID NO: 190 - DNA, 32 bp, Aeromonas hydrophila; identical to SEQ ID NO: 164
  modified_base (13)..(20): a, c, t or g

SEQ ID NO: 191 - DNA, 32 bp, Aeromonas bestiarum; identical to SEQ ID NO: 164
  modified_base (13)..(20): a, c, t or g

SEQ ID NO: 192 - DNA, 32 bp, Aeromonas bestiarum; identical to SEQ ID NO: 164
  modified_base (13)..(20): a, c, t or g

SEQ ID NO: 193 - DNA, 32 bp, Aeromonas salmonicida; identical to SEQ ID NO: 164
  modified_base (13)..(20): a, c, t or g

SEQ ID NO: 194 - DNA, 32 bp, Aeromonas sp. CA23; identical to SEQ ID NO: 164
  modified_base (13)..(20): a, c, t or g

SEQ ID NO: 195 - DNA, 32 bp, Aeromonas hydrophila; identical to SEQ ID NO: 164
  modified_base (13)..(20): a, c, t or g

SEQ ID NO: 196 - DNA, 32 bp, Aeromonas salmonicida; identical to SEQ ID NO: 164
  modified_base (13)..(20): a, c, t or g

SEQ ID NO: 197 - DNA, 32 bp, Aeromonas hydrophila; identical to SEQ ID NO: 164
  modified_base (13)..(20): a, c, t or g

SEQ ID NO: 198 - DNA, 32 bp, Aeromonas salmonicida; identical to SEQ ID NO: 164
  modified_base (13)..(20): a, c, t or g

SEQ ID NO: 199 - DNA, 32 bp, Aeromonas salmonicida subsp. salmonicida A449; identical to SEQ ID NO: 164
  modified_base (13)..(20): a, c, t or g

SEQ ID NO: 200 - DNA, 32 bp, Aeromonas sp. ASNIH5; identical to SEQ ID NO: 164
  modified_base (13)..(20): a, c, t or g

SEQ ID NO: 201 - DNA, 32 bp, Aeromonas caviae; identical to SEQ ID NO: 164
  modified_base (13)..(20): a, c, t or g

SEQ ID NO: 202 - DNA, 32 bp, Aeromonas sp. ZOR0002; identical to SEQ ID NO: 164
  modified_base (13)..(20): a, c, t or g

SEQ ID NO: 203 - DNA, 32 bp, Aeromonas veronii; identical to SEQ ID NO: 164
  modified_base (13)..(20): a, c, t or g

SEQ ID NO: 204 - DNA, 32 bp, Aeromonas allosaccharophila; identical to SEQ ID NO: 164
  modified_base (13)..(20): a, c, t or g

SEQ ID NO: 205 - DNA, 32 bp, Aeromonas veronii; identical to SEQ ID NO: 164
  modified_base (13)..(20): a, c, t or g

SEQ ID NO: 206 - DNA, 32 bp, Aeromonas sp. YN13HZO-058; identical to SEQ ID NO: 164
  modified_base (13)..(20): a, c, t or g

SEQ ID NO: 207 - DNA, 32 bp, Unknown; identical to SEQ ID NO: 164
  source: /note="Description of Unknown: Unclassified Aeromonas sequence"
  modified_base (13)..(20): a, c, t or g

SEQ ID NO: 208 - DNA, 32 bp, Aeromonas sp. 159; identical to SEQ ID NO: 164
  modified_base (13)..(20): a, c, t or g

SEQ ID NO: 209 - DNA, 32 bp, Aeromonas veronii; identical to SEQ ID NO: 164
  modified_base (13)..(20): a, c, t or g

SEQ ID NO: 210 - DNA, 32 bp, Aeromonas caviae; identical to SEQ ID NO: 164
  modified_base (13)..(20): a, c, t or g

SEQ ID NO: 211 - DNA, 32 bp, Aeromonas sp. SCS5; identical to SEQ ID NO: 164
  modified_base (13)..(20): a, c, t or g

SEQ ID NO: 212 - DNA, 32 bp, Aeromonas hydrophila; identical to SEQ ID NO: 164
  modified_base (13)..(20): a, c, t or g

SEQ ID NO: 213 - DNA, 32 bp, Aeromonas hydrophila YL17; identical to SEQ ID NO: 164
  modified_base (13)..(20): a, c, t or g

SEQ ID NO: 214 - DNA, 32 bp, Aeromonas dhakensis; identical to SEQ ID NO: 164
  modified_base (13)..(20): a, c, t or g

SEQ ID NO: 215 - DNA, 32 bp, Aeromonas hydrophila; identical to SEQ ID NO: 164
  modified_base (13)..(20): a, c, t or g

SEQ ID NO: 216 - DNA, 32 bp, Aeromonas enteropelogenes; identical to SEQ ID NO: 164
  modified_base (13)..(20): a, c, t or g

SEQ ID NO: 217 - DNA, 32 bp, Aeromonas hydrophila; identical to SEQ ID NO: 164
  modified_base (13)..(20): a, c, t or g

SEQ ID NO: 218 - DNA, 32 bp, Aeromonas salmonicida; identical to SEQ ID NO: 164
  modified_base (13)..(20): a, c, t or g

SEQ ID NO: 219 - DNA, 32 bp, Aeromonas hydrophila; identical to SEQ ID NO: 164
  modified_base (13)..(20): a, c, t or g

SEQ ID NO: 220 - DNA, 32 bp, Aeromonas aquatica; identical to SEQ ID NO: 164
  modified_base (13)..(20): a, c, t or g

SEQ ID NO: 221 - DNA, 32 bp, Aeromonas sp.; identical to SEQ ID NO: 164
  modified_base (13)..(20): a, c, t or g

SEQ ID NO: 222 - DNA, 32 bp, Aeromonas hydrophila ML09-119; identical to SEQ ID NO: 164
  modified_base (13)..(20): a, c, t or g

SEQ ID NO: 223 - DNA, 32 bp, Aeromonas encheleia; identical to SEQ ID NO: 164
  modified_base (13)..(20): a, c, t or g

SEQ ID NO: 224 - DNA, 32 bp, Aeromonas eucrenophila; identical to SEQ ID NO: 164
  modified_base (13)..(20): a, c, t or g

SEQ ID NO: 225 - DNA, 32 bp, Aeromonas salmonicida; identical to SEQ ID NO: 164
  modified_base (13)..(20): a, c, t or g

SEQ ID NO: 226 - DNA, 32 bp, Aeromonas salmonicida; identical to SEQ ID NO: 164
  modified_base (13)..(20): a, c, t or g

SEQ ID NO: 227 - DNA, 32 bp, Aeromonas salmonicida; identical to SEQ ID NO: 164
  modified_base (13)..(20): a, c, t or g

SEQ ID NO: 228 - DNA, 32 bp, Aeromonas salmonicida; identical to SEQ ID NO: 164
  modified_base (13)..(20): a, c, t or g

SEQ ID NO: 229 - DNA, 32 bp, Aeromonas caviae; identical to SEQ ID NO: 164
  modified_base (13)..(20): a, c, t or g

SEQ ID NO: 230 - DNA, 32 bp, Aeromonas veronii AMC34; identical to SEQ ID NO: 164
  modified_base (13)..(20): a, c, t or g

SEQ ID NO: 231 - DNA, 32 bp, Aeromonas veronii AER39; identical to SEQ ID NO: 164
  modified_base (13)..(20): a, c, t or g

SEQ ID NO: 232 - DNA, 32 bp, Aeromonas australiensis; identical to SEQ ID NO: 164
  modified_base (13)..(20): a, c, t or g

SEQ ID NO: 233 - DNA, 32 bp, Aeromonas veronii B565; identical to SEQ ID NO: 164
  modified_base (13)..(20): a, c, t or g

SEQ ID NO: 234 - DNA, 32 bp, Aeromonas salmonicida subsp. pectinolytica 34mel; identical to SEQ ID NO: 164
  modified_base (13)..(20): a, c, t or g

SEQ ID NO: 235 - DNA, 32 bp, Aeromonas salmonicida; identical to SEQ ID NO: 164
  modified_base (13)..(20): a, c, t or g

SEQ ID NO: 236 - DNA, 32 bp, Aeromonas veronii
  modified_base (13)..(20): a, c, t or g
caagtattgatannnnnnnntatcgatactta

SEQ ID NO: 237 - DNA, 32 bp, Bacillus nakamurai
  modified_base (13)..(20): a, c, t or g
ccagcccctacannnnnnnntgtaggggctgt

SEQ ID NO: 238 - DNA, 35 bp, Prevotella micans
  modified_base (14)..(22): a, c, t or g
tgcaaatattacannnnnnnnntgtaatttttgca

SEQ ID NO: 239 - DNA, 32 bp, Aeromonas veronii
  modified_base (13)..(20): a, c, t or g
taagtatcgatannnnnnnntatcgatacttg

SEQ ID NO: 240 - DNA, 32 bp, Aeromonas veronii; identical to SEQ ID NO: 239
  modified_base (13)..(20): a, c, t or g

SEQ ID NO: 241 - DNA, 32 bp, Aeromonas veronii; identical to SEQ ID NO: 239
  modified_base (13)..(20): a, c, t or g

SEQ ID NO: 242 - DNA, 32 bp, Aeromonas dhakensis; identical to SEQ ID NO: 239
  modified_base (13)..(20): a, c, t or g

SEQ ID NO: 243 - DNA, 32 bp, Aeromonas sp. HMWF017; identical to SEQ ID NO: 239
  modified_base (13)..(20): a, c, t or g

SEQ ID NO: 244 - DNA, 32 bp, Aeromonas veronii; identical to SEQ ID NO: 239
  modified_base (13)..(20): a, c, t or g

SEQ ID NO: 245 - DNA, 32 bp, Aeromonas dhakensis; identical to SEQ ID NO: 239
  modified_base (13)..(20): a, c, t or g

SEQ ID NO: 246 - DNA, 32 bp, Aeromonas veronii; identical to SEQ ID NO: 239
  modified_base (13)..(20): a, c, t or g

SEQ ID NO: 247 - DNA, 32 bp, Aeromonas sobria; identical to SEQ ID NO: 239
  modified_base (13)..(20): a, c, t or g

SEQ ID NO: 248 - DNA, 32 bp, Aeromonas veronii; identical to SEQ ID NO: 239
  modified_base (13)..(20): a, c, t or g

SEQ ID NO: 249 - DNA, 32 bp, Aeromonas jandaei; identical to SEQ ID NO: 239
  modified_base (13)..(20): a, c, t or g

SEQ ID NO: 250 - DNA, 32 bp, Aeromonas veronii; identical to SEQ ID NO: 239
  modified_base (13)..(20): a, c, t or g

SEQ ID NO: 251 - DNA, 32 bp, Aeromonas veronii; identical to SEQ ID NO: 239
  modified_base (13)..(20): a, c, t or g

SEQ ID NO: 252 - DNA, 32 bp, Aeromonas veronii; identical to SEQ ID NO: 239
  modified_base (13)..(20): a, c, t or g

SEQ ID NO: 253 - DNA, 32 bp, Aeromonas allosaccharophila; identical to SEQ ID NO: 239
  modified_base (13)..(20): a, c, t or g

SEQ ID NO: 254 - DNA, 32 bp, Aeromonas caviae; identical to SEQ ID NO: 239
  modified_base (13)..(20): a, c, t or g

SEQ ID NO: 255 - DNA, 32 bp, Aeromonas media; identical to SEQ ID NO: 239
  modified_base (13)..(20): a, c, t or g

SEQ ID NO: 256 - DNA, 32 bp, Aeromonas dhakensis; identical to SEQ ID NO: 239
  modified_base (13)..(20): a, c, t or g

SEQ ID NO: 257 - DNA, 32 bp, Aeromonas sp.; identical to SEQ ID NO: 239
  modified_base (13)..(20): a, c, t or g

SEQ ID NO: 258 - DNA, 32 bp, Aeromonas dhakensis; identical to SEQ ID NO: 239
  modified_base (13)..(20): a, c, t or g

SEQ ID NO: 259 - DNA, 32 bp, Aeromonas dhakensis; identical to SEQ ID NO: 239
  modified_base (13)..(20): a, c, t or g

SEQ ID NO: 260 - DNA, 32 bp, Aeromonas media; identical to SEQ ID NO: 239
  modified_base (13)..(20): a, c, t or g

SEQ ID NO: 261 - DNA, 32 bp, Aeromonas dhakensis; identical to SEQ ID NO: 239
  modified_base (13)..(20): a, c, t or g

SEQ ID NO: 262 - DNA, 32 bp, Aeromonas dhakensis; identical to SEQ ID NO: 239
  modified_base (13)..(20): a, c, t or g

SEQ ID NO: 263 - DNA, 32 bp, Aeromonas hydrophila; identical to SEQ ID NO: 239
  modified_base (13)..(20): a, c, t or g

SEQ ID NO: 264 - DNA, 32 bp, Aeromonas hydrophila; identical to SEQ ID NO: 239
  modified_base (13)..(20): a, c, t or g

SEQ ID NO: 265 - DNA, 32 bp, Aeromonas hydrophila; identical to SEQ ID NO: 239
  modified_base (13)..(20): a, c, t or g

SEQ ID NO: 266 - DNA, 32 bp, Aeromonas hydrophila; identical to SEQ ID NO: 239
  modified_base (13)..(20): a, c, t or g

SEQ ID NO: 267 - DNA, 32 bp, Aeromonas hydrophila; identical to SEQ ID NO: 239
  modified_base (13)..(20): a, c, t or g

SEQ ID NO: 268 - DNA, 32 bp, Aeromonas hydrophila; identical to SEQ ID NO: 239
  modified_base (13)..(20): a, c, t or g

SEQ ID NO: 269 - DNA, 32 bp, Aeromonas salmonicida; identical to SEQ ID NO: 239
  modified_base (13)..(20): a, c, t or g

SEQ ID NO: 270 - DNA, 32 bp, Aeromonas salmonicida; identical to SEQ ID NO: 239
  modified_base (13)..(20): a, c, t or g

SEQ ID NO: 271 - DNA, 32 bp, Aeromonas sp.; identical to SEQ ID NO: 239
  modified_base (13)..(20): a, c, t or g

SEQ ID NO: 272 - DNA, 32 bp, Aeromonas salmonicida; identical to SEQ ID NO: 239
  modified_base (13)..(20): a, c, t or g

SEQ ID NO: 273 - DNA, 32 bp, Aeromonas sp.; identical to SEQ ID NO: 239
  modified_base (13)..(20): a, c, t or g

SEQ ID NO: 274 - DNA, 32 bp, Aeromonas hydrophila; identical to SEQ ID NO: 239
  modified_base (13)..(20): a, c, t or g

SEQ ID NO: 275 - DNA, 32 bp, Aeromonas hydrophila; identical to SEQ ID NO: 239
  modified_base (13)..(20): a, c, t or g

SEQ ID NO: 276 - DNA, 32 bp, Aeromonas hydrophila; identical to SEQ ID NO: 239
  modified_base (13)..(20): a, c, t or g

SEQ ID NO: 277 - DNA, 32 bp, Aeromonas hydrophila; identical to SEQ ID NO: 239
  modified_base (13)..(20): a, c, t or g

SEQ ID NO: 278 - DNA, 32 bp, Aeromonas salmonicida; identical to SEQ ID NO: 239
  modified_base (13)..(20): a, c, t or g

SEQ ID NO: 279 - DNA, 32 bp, Aeromonas hydrophila; identical to SEQ ID NO: 239
  modified_base (13)..(20): a, c, t or g

SEQ ID NO: 280 - DNA, 32 bp, Aeromonas hydrophila; identical to SEQ ID NO: 239
  modified_base (13)..(20): a, c, t or g

SEQ ID NO: 281 - DNA, 32 bp, Aeromonas hydrophila; identical to SEQ ID NO: 239
  modified_base (13)..(20): a, c, t or g

SEQ ID NO: 282 - DNA, 32 bp, Aeromonas hydrophila; identical to SEQ ID NO: 239
  modified_base (13)..(20): a, c, t or g

SEQ ID NO: 283 - DNA, 32 bp, Aeromonas salmonicida; identical to SEQ ID NO: 239
  modified_base (13)..(20): a, c, t or g

SEQ ID NO: 284 - DNA, 32 bp, Aeromonas sp. ASNIH2; identical to SEQ ID NO: 239
  modified_base (13)..(20): a, c, t or g

SEQ ID NO: 285 - DNA, 32 bp, Aeromonas caviae; identical to SEQ ID NO: 239
  modified_base (13)..(20): a, c, t or g

SEQ ID NO: 286 - DNA, 32 bp, Aeromonas media; identical to SEQ ID NO: 239
  modified_base (13)..(20): a, c, t or g

SEQ ID NO: 287 - DNA, 32 bp, Aeromonas sp. HZM; identical to SEQ ID NO: 239
  modified_base (13)..(20): a, c, t or g

SEQ ID NO: 288 - DNA, 32 bp, Aeromonas sp. ASNIH8; identical to SEQ ID NO: 239
  modified_base (13)..(20): a, c, t or g

SEQ ID NO: 289 - DNA, 32 bp, Aeromonas enteropelogenes; identical to SEQ ID NO: 239
  modified_base (13)..(20): a, c, t or g

SEQ ID NO: 290 - DNA, 32 bp, Aeromonas sp. ASNIH7; identical to SEQ ID NO: 239
  modified_base (13)..(20): a, c, t or g

SEQ ID NO: 291 - DNA, 32 bp, Aeromonas sp. ASNIH3; identical to SEQ ID NO: 239
  modified_base (13)..(20): a, c, t or g

SEQ ID NO: 292 - DNA, 32 bp, Aeromonas allosaccharophila; identical to SEQ ID NO: 239
  modified_base (13)..(20): a, c, t or g

SEQ ID NO: 293 - DNA, 32 bp, Aeromonas caviae; identical to SEQ ID NO: 239
  modified_base (13)..(20): a, c, t or g

SEQ ID NO: 294 - DNA, 32 bp, Aeromonas caviae; identical to SEQ ID NO: 239
  modified_base (13)..(20): a, c, t or g

SEQ ID NO: 295 - DNA, 32 bp, Aeromonas encheleia; identical to SEQ ID NO: 239
  modified_base (13)..(20): a, c, t or g

SEQ ID NO: 296 - DNA, 32 bp, Aeromonas jandaei; identical to SEQ ID NO: 239
  modified_base (13)..(20): a, c, t or g

SEQ ID NO: 297 - DNA, 32 bp, Aeromonas jandaei; identical to SEQ ID NO: 239
  modified_base (13)..(20): a, c, t or g

SEQ ID NO: 298 - DNA, 32 bp, Aeromonas veronii; identical to SEQ ID NO: 239
  modified_base (13)..(20): a, c, t or g

SEQ ID NO: 299 - DNA, 32 bp, Aeromonas veronii; identical to SEQ ID NO: 239
  modified_base (13)..(20): a, c, t or g

SEQ ID NO: 300 - DNA, 32 bp, Aeromonas veronii; identical to SEQ ID NO: 239
  modified_base (13)..(20): a, c, t or g

SEQ ID NO: 301 - DNA, 32 bp, Aeromonas allosaccharophila; identical to SEQ ID NO: 239
  modified_base (13)..(20): a, c, t or g

SEQ ID NO: 302 - DNA, 32 bp, Aeromonas veronii; identical to SEQ ID NO: 239
  modified_base (13)..(20): a, c, t or g

SEQ ID NO: 303 - DNA, 32 bp, Aeromonas dhakensis; identical to SEQ ID NO: 239
  modified_base (13)..(20): a, c, t or g

SEQ ID NO: 304 - DNA, 32 bp, Aeromonas popoffii; identical to SEQ ID NO: 239
  modified_base (13)..(20): a, c, t or g

SEQ ID NO: 305 - DNA, 32 bp, Aeromonas caviae; identical to SEQ ID NO: 239
  modified_base (13)..(20): a, c, t or g

SEQ ID NO: 306 - DNA, 32 bp, Aeromonas caviae; identical to SEQ ID NO: 239
  modified_base (13)..(20): a, c, t or g

SEQ ID NO: 307 - DNA, 32 bp, Aeromonas hydrophila; identical to SEQ ID NO: 239
  modified_base (13)..(20): a, c, t or g

SEQ ID NO: 308 - DNA, 32 bp, Aeromonas piscicola; identical to SEQ ID NO: 239
  modified_base (13)..(20): a, c, t or g

SEQ ID NO: 309 - DNA, 32 bp, Aeromonas hydrophila; identical to SEQ ID NO: 239
  modified_base (13)..(20): a, c, t or g

SEQ ID NO: 310 - DNA, 32 bp, Aeromonas hydrophila; identical to SEQ ID NO: 239
  modified_base (13)..(20): a, c, t or g

SEQ ID NO: 311 - DNA, 32 bp, Aeromonas bestiarum; identical to SEQ ID NO: 239
  modified_base (13)..(20): a, c, t or g

SEQ ID NO: 312 - DNA, 32 bp, Aeromonas tecta; identical to SEQ ID NO: 239
  modified_base (13)..(20): a, c, t or g

SEQ ID NO: 313 - DNA, 32 bp, Aeromonas sp. 62-46; identical to SEQ ID NO: 239
  modified_base (13)..(20): a, c, t or g

SEQ ID NO: 314 - DNA, 32 bp, Aeromonas encheleia; identical to SEQ ID NO: 239
  modified_base (13)..(20): a, c, t or g

SEQ ID NO: 315 - DNA, 32 bp, Aeromonas fluvialis; identical to SEQ ID NO: 239
  modified_base (13)..(20): a, c, t or g

SEQ ID NO: 316 - DNA, 32 bp, Aeromonas veronii; identical to SEQ ID NO: 239
  modified_base (13)..(20): a, c, t or g

SEQ ID NO: 317 - DNA, 32 bp, Aeromonas veronii AMC35; identical to SEQ ID NO: 239
  modified_base (13)..(20): a, c, t or g

SEQ ID NO: 318 - DNA, 32 bp, Aeromonas veronii; identical to SEQ ID NO: 239
  modified_base (13)..(20): a, c, t or g

SEQ ID NO: 319 - DNA, 32 bp, Aeromonas veronii AER397; identical to SEQ ID NO: 239
  modified_base (13)..(20): a, c, t or g

SEQ ID NO: 320 - DNA, 32 bp, Aeromonas hydrophila; identical to SEQ ID NO: 239
  modified_base (13)..(20): a, c, t or g

SEQ ID NO: 321 - DNA, 32 bp, Aeromonas salmonicida subsp. salmonicida 01-B526; identical to SEQ ID NO: 239
  modified_base (13)..(20): a, c, t or g

SEQ ID NO: 322 - DNA, 32 bp, Xenorhabdus doucetiae
  modified_base (13)..(20): a, c, t or g
agacacctcagannnnnnnntctgaggtgttt

SEQ ID NO: 323 - DNA, 31 bp, Escherichia coli
  modified_base (13)..(19): a, c, t or g
caagagatcacannnnnnntgtggtctcttt

SEQ ID NO: 324 - DNA, 33 bp, Nocardia farcinica
  modified_base (13)..(21): a, c, t or g
gtgccacagatannnnnnnnntatccgtggcac

SEQ ID NO: 325 - DNA, 32 bp, Serratia symbiotica
  modified_base (13)..(20): a, c, t or g
gctgatttcagannnnnnnntctgaaatcatc

SEQ ID NO: 326 - DNA, 33 bp, Negativicoccus massiliensis
  modified_base (13)..(21): a, c, t or g
taaataacgatannnnnnnnntatcgttattta

SEQ ID NO: 327 - DNA, 33 bp, Negativicoccus succinicivorans DORA_17_25; identical to SEQ ID NO: 326
  modified_base (13)..(21): a, c, t or g

SEQ ID NO: 328 - DNA, 33 bp, Comamonas sp. 26
  modified_base (13)..(21): a, c, t or g
tgactatcgatannnnnnnnntatcgatattta

SEQ ID NO: 329 - DNA, 33 bp, Thioclava sp. SK-1
  modified_base (13)..(21): a, c, t or g
taatgtccaatannnnnnnnntatcggacatta

SEQ ID NO: 330 - DNA, 33 bp, Pantoea stewartii
  modified_base (13)..(21): a, c, t or g
gataataagatannnnnnnnncatcttattatc

SEQ ID NO: 331 - DNA, 32 bp, Paraburkholderia sp. BL21I4N1
  modified_base (13)..(20): a, c, t or g
cagctattgatannnnnnnntatcaatagttg

SEQ ID NO: 332 - DNA, 32 bp, Paraburkholderia sp. BL21I4N1; identical to SEQ ID NO: 331
  modified_base (13)..(20): a, c, t or g

SEQ ID NO: 333 - DNA, 33 bp, Pseudomonas putida S11
  modified_base (13)..(21): a, c, t or g
tcaggttcgagannnnnnnnntctcgaacgtca

SEQ ID NO: 334 - DNA, 33 bp, Exiguobacterium sp. RIT341
  modified_base (13)..(21): a, c, t or g
ctacttgtgatannnnnnnnntatcacaagtag

SEQ ID NO: 335 - DNA, 35 bp, Dorea formicigenerans
  modified_base (14)..(22): a, c, t or g
aaaaggtactatannnnnnnnntatagtacctttt

SEQ ID NO: 336 - DNA, 32 bp, Enterococcus hirae
  modified_base (13)..(20): a, c, t or g
atacaatagacannnnnnnnagcctattgtat

SEQ ID NO: 337 - DNA, 32 bp, Enterococcus villorum; identical to SEQ ID NO: 336
  modified_base (13)..(20): a, c, t or g

SEQ ID NO: 338 - DNA, 33 bp, Alphaproteobacteria bacterium HGW-Alphaproteobacteria-16
  modified_base (13)..(21): a, c, t or g
agagtgttgatannnnnnnnntatcaacactag

SEQ ID NO: 339 - DNA, 35 bp, alpha proteobacterium HIMB5
  modified_base (14)..(22): a, c, t or g
attactatcgatannnnnnnnntatcgttagtaat

SEQ ID NO: 340 - DNA, 33 bp, Mesorhizobium sp.
  modified_base (13)..(21): a, c, t or g
taactatcgatannnnnnnnntatcgataatga

SEQ ID NO: 341 - DNA, 33 bp, Sinorhizobium meliloti
  modified_base (13)..(21): a, c, t or g
tcactatcgatannnnnnnnntatcgataatga

SEQ ID NO: 342 - DNA, 33 bp, Rhizobiales bacterium; identical to SEQ ID NO: 341
  modified_base (13)..(21): a, c, t or g

SEQ ID NO: 343 - DNA, 33 bp, Sinorhizobium fredii
  modified_base (13)..(21): a, c, t or g
tcactatcgatannnnnnnnntatcgatagtaa

SEQ ID NO: 344 - DNA, 33 bp, Rhizobiales bacterium
  modified_base (13)..(21): a, c, t or g
ttactatcgatannnnnnnnntatcgatagtga

SEQ ID NO: 345 - DNA, 33 bp, Roseovarius sp.
  modified_base (13)..(21): a, c, t or g
ctatgtccaatannnnnnnnntatcggacatat

SEQ ID NO: 346 - DNA, 33 bp, Sulfitobacter pseudonitzschiae; identical to SEQ ID NO: 345
  modified_base (13)..(21): a, c, t or g

SEQ ID NO: 347 - DNA, 33 bp, Mesorhizobium sp. LSHC420B00
  modified_base (13)..(21): a, c, t or g
aaacgaatgatannnnnnnnntatcattcgttt

SEQ ID NO: 348 - DNA, 33 bp, Anaerotignum propionicum
  modified_base (13)..(21): a, c, t or g
aaaacctccatannnnnnnnncatggaggtttt

SEQ ID NO: 349 - DNA, 31 bp, Streptomyces sp. KE1
  modified_base (13)..(19): a, c, t or g
gggcccgcgagannnnnnngctcgcgggccc

SEQ ID NO: 350 - DNA, 31 bp, Actinobacillus minor
  modified_base (13)..(19): a, c, t or g
acaaaccctatannnnnnntatagggttact

SEQ ID NO: 351 - DNA, 34 bp, Unknown
  source: /note="Description of Unknown: Bacteria sequence"
  modified_base (14)..(21): a, c, t or g
tacacgttacatannnnnnnntatgtaaattgta

SEQ ID NO: 352 - DNA, 33 bp, Anabaena cylindrica
  modified_base (13)..(21): a, c, t or g
ctacccaagagannnnnnnnnactgttgggtag

SEQ ID NO: 353 - DNA, 35 bp, Hymenobacter lapidarius
  modified_base (14)..(22): a, c, t or g
ataagttatgatannnnnnnnntatcataacctat

SEQ ID NO: 354 - DNA, 32 bp, Unknown
  source: /note="Description of Unknown: Enterobacterales sequence"
  modified_base (13)..(20): a, c, t or g
ctattagccacannnnnnnntgtagcaaatag

SEQ ID NO: 355 - DNA, 32 bp, Klebsiella aerogenes; identical to SEQ ID NO: 354
  modified_base (13)..(20): a, c, t or g

SEQ ID NO: 356 - DNA, 32 bp, Bacillus sp.
  modified_base (13)..(20): a, c, t or g
tctgtaacaagannnnnnnntcttgttacaga

SEQ ID NO: 357 - DNA, 32 bp, Bacillus sp.; identical to SEQ ID NO: 356
  modified_base (13)..(20): a, c, t or g

SEQ ID NO: 358 - DNA, 33 bp, Phycicoccus sp. Soil802
  modified_base (13)..(21): a, c, t or g
ggcggcccgacannnnnnnnntgccgggccgcc

SEQ ID NO: 359 - DNA, 32 bp, Achromobacter sp.
  modified_base (13)..(20): a, c, t or g
aacagccgaagannnnnnnntcttcggccttt

SEQ ID NO: 360 - DNA, 33 bp, Enterococcus sp.
  modified_base (13)..(21): a, c, t or g
cccttgcaaagannnnnnnnntcatttcaaggg

SEQ ID NO: 361 - DNA, 33 bp, Enterococcus sp.; identical to SEQ ID NO: 360
  modified_base (13)..(21): a, c, t or g

SEQ ID NO: 362 - DNA, 33 bp, Enterococcus avium; identical to SEQ ID NO: 360
  modified_base (13)..(21): a, c, t or g

SEQ ID NO: 363 - DNA, 33 bp, Enterococcus sp. 3H8_DIV0648; identical to SEQ ID NO: 360
  modified_base (13)..(21): a, c, t or g

SEQ ID NO: 364 - DNA, 31 bp, Bacteriovorax sp. BAL6_X
  modified_base (13)..(19): a, c, t or g
gactggcaaagannnnnnngctttgtcagtc

SEQ ID NO: 365 - DNA, 32 bp, Deinococcus phoenicis
  modified_base (13)..(20): a, c, t or g
agcggcgggagannnnnnnngctcccaccgct

SEQ ID NO: 366 - DNA, 33 bp, Methylobacterium sp. UNC300MFChir4.1
  modified_base (13)..(21): a, c, t or g
ctacgtctgatannnnnnnnntatcagacgctg

SEQ ID NO: 367 - DNA, 33 bp, Unknown; identical to SEQ ID NO: 366
  source: /note="Description of Unknown: Unclassified Methylobacterium sequence"
  modified_base (13)..(21): a, c, t or g

SEQ ID NO: 368 - DNA, 33 bp, Methylobacterium sp. 190mf; identical to SEQ ID NO: 366
  modified_base (13)..(21): a, c, t or g

SEQ ID NO: 369 - DNA, 33 bp, Nocardia cyriacigeorgica
  modified_base (13)..(21): a, c, t or g
ataccccagatannnnnnnnntatccggggtat

SEQ ID NO: 370 - DNA, 32 bp, Unknown
  source: /note="Description of Unknown: Unclassified Synechococcus sequence"
  modified_base (13)..(20): a, c, t or g
aagcttacgatannnnnnnntttcgtaagctt

SEQ ID NO: 371 - DNA, 31 bp, Vibrio nigripulchritudo
  modified_base (13)..(19): a, c, t or g
ggtagtaacagannnnnnnactgttactacc

SEQ ID NO: 372 - DNA, 33 bp, Sulfitobacter sp. AM1-D1
  modified_base (13)..(21): a, c, t or g
acatgtccgatannnnnnnnntattggacatat

SEQ ID NO: 373 - DNA, 32 bp, Oscillatoriales cyanobacterium JSC-12
  modified_base (13)..(20): a, c, t or g
tagttggtgatannnnnnnntatcaccaactc

SEQ ID NO: 374 - DNA, 31 bp, Rhodococcus sp. Br-6
  modified_base (13)..(19): a, c, t or g
gggcctgcgagannnnnnnactcgcaggccc

SEQ ID NO: 375 - DNA, 33 bp, Rhizobium oryzae
  modified_base (13)..(21): a, c, t or g
aaacgaccgatannnnnnnnntatcgttcattt

SEQ ID NO: 376 - DNA, 32 bp, Gluconobacter oxydans
  modified_base (13)..(20): a, c, t or g
tagtgtctgagannnnnnnntctcagacacta

SEQ ID NO: 377 - DNA, 32 bp, Lachnoclostridium pacaense
  modified_base (13)..(20): a, c, t or g
agaacccggacannnnnnnngttccgggttct

SEQ ID NO: 378 - DNA, 33 bp, Erythrobacter sp. SG61-1L
  modified_base (13)..(21): a, c, t or g
agggtgttgatannnnnnnnntatcaccactct

SEQ ID NO: 379 - DNA, 33 bp, Erythrobacter sp. SG61-1L; identical to SEQ ID NO: 378
  modified_base (13)..(21): a, c, t or g

SEQ ID NO: 380 - DNA, 33 bp, Roseovarius azorensis
  modified_base (13)..(21): a, c, t or g
ttatgtccgatannnnnnnnntattggacatag

SEQ ID NO: 381 - DNA, 33 bp, Epibacterium scottomollicae; identical to SEQ ID NO: 380
  modified_base (13)..(21): a, c, t or g

SEQ ID NO: 382 - DNA, 33 bp, Maritimibacter alkaliphilus; identical to SEQ ID NO: 380
  modified_base (13)..(21): a, c, t or g

SEQ ID NO: 383 - DNA, 33 bp, Jonesia quinghaiensis
  modified_base (13)..(21): a, c, t or g
ttggttggaatannnnnnnnntattcaaaccaa

SEQ ID NO: 384 - DNA, 32 bp, Geobacillus thermodenitrificans
  modified_base (13)..(20): a, c, t or g
gaatacaacatannnnnnnntatgttgcattc

SEQ ID NO: 385 - DNA, 31 bp, Unknown
  source: /note="Description of Unknown: Unclassified Massilia sequence"
  modified_base (13)..(19): a, c, t or g
aactcgacaatannnnnnntaatgtcgagtt

SEQ ID NO: 386 - DNA, 31 bp, Unknown; identical to SEQ ID NO: 385
  source: /note="Description of Unknown: Unclassified Massilia sequence"
  modified_base (13)..(19): a, c, t or g

SEQ ID NO: 387 - DNA, 36 bp, Plesiomonas shigelloides
  modified_base (15)..(22): a, c, t or g
attaacttcatatannnnnnnntatatgaagttaat

SEQ ID NO: 388 - DNA, 34 bp, Shewanella putrefaciens
  modified_base (14)..(21): a, c, t or g
tctaccagtgatannnnnnnntatcactggtaga

SEQ ID NO: 389 - DNA, 34 bp, Shewanella decolorationis; identical to SEQ ID NO: 388
  modified_base (14)..(21): a, c, t or g

SEQ ID NO: 390 - DNA, 34 bp, Shewanella sp. BC20; identical to SEQ ID NO: 388
  modified_base (14)..(21): a, c, t or g

SEQ ID NO: 391 - DNA, 34 bp, Shewanella putrefaciens; identical to SEQ ID NO: 388
  modified_base (14)..(21): a, c, t or g

SEQ ID NO: 392 - DNA, 34 bp, Shewanella baltica OS223; identical to SEQ ID NO: 388
  modified_base (14)..(21): a, c, t or g

SEQ ID NO: 393 - DNA, 34 bp, Shewanella baltica BA175; identical to SEQ ID NO: 388
  modified_base (14)..(21): a, c, t or g

SEQ ID NO: 394 - DNA, 34 bp, Shewanella baltica; identical to SEQ ID NO: 388
  modified_base (14)..(21): a, c, t or g

SEQ ID NO: 395 - DNA, 34 bp, Shewanella halifaxensis; identical to SEQ ID NO: 388
  modified_base (14)..(21): a, c, t or g

SEQ ID NO: 396 - DNA, 34 bp, Shewanella baltica; identical to SEQ ID NO: 388
  modified_base (14)..(21): a, c, t or g

SEQ ID NO: 397 - DNA, 34 bp, Shewanella putrefaciens; identical to SEQ ID NO: 388
  modified_base (14)..(21): a, c, t or g

SEQ ID NO: 398 - DNA, 34 bp, Shewanella baltica; identical to SEQ ID NO: 388
  modified_base (14)..(21): a, c, t or g

SEQ ID NO: 399 - DNA, 32 bp, Shewanella pealeana
  modified_base (13)..(20): a, c, t or g
ctaccagtgatannnnnnnntatcactggtag

SEQ ID NO: 400 - DNA, 32 bp, Shewanella pealeana ATCC 700345; identical to SEQ ID NO: 399
  modified_base (13)..(20): a, c, t or g

SEQ ID NO: 401 - DNA, 32 bp, Shewanella sp. MR-4; identical to SEQ ID NO: 399
  modified_base (13)..(20): a, c, t or g

SEQ ID NO: 402 - DNA, 32 bp, Shewanella xiamenensis; identical to SEQ ID NO: 399
  modified_base (13)..(20): a, c, t or g

SEQ ID NO: 403 - DNA, 32 bp, Shewanella psychrophila; identical to SEQ ID NO: 399
  modified_base (13)..(20): a, c, t or g

SEQ ID NO: 404 - DNA, 32 bp, Shewanella violacea; identical to SEQ ID NO: 399
  modified_base (13)..(20): a, c, t or g

SEQ ID NO: 405 - DNA, 32 bp, Shewanella baltica; identical to SEQ ID NO: 399
  modified_base (13)..(20): a, c, t or g

SEQ ID NO: 406 - DNA, 32 bp, Shewanella putrefaciens; identical to SEQ ID NO: 399
  modified_base (13)..(20): a, c, t or g

SEQ ID NO: 407 - DNA, 32 bp, Shewanella piezotolerans; identical to SEQ ID NO: 399
  modified_base (13)..(20): a, c, t or g

SEQ ID NO: 408 - DNA, 32 bp, Shewanella sp. Shew256; identical to SEQ ID NO: 399
  modified_base (13)..(20): a, c, t or g

SEQ ID NO: 409 - DNA, 32 bp, Shewanella sp. MR-7; identical to SEQ ID NO: 399
  modified_base (13)..(20): a, c, t or g

SEQ ID NO: 410 - DNA, 32 bp, Shewanella oneidensis; identical to SEQ ID NO: 399
  modified_base (13)..(20): a, c, t or g

SEQ ID NO: 411 - DNA, 32 bp, Shewanella xiamenensis; identical to SEQ ID NO: 399
  modified_base (13)..(20): a, c, t or g

SEQ ID NO: 412 - DNA, 32 bp, Shewanella sp.; identical to SEQ ID NO: 399
  modified_base (13)..(20): a, c, t or g

SEQ ID NO: 413 - DNA, 32 bp, Unknown; identical to SEQ ID NO: 399
  source: /note="Description of Unknown: Unclassified Shewanella sequence"
  modified_base (13)..(20): a, c, t or g

SEQ ID NO: 414 - DNA, 32 bp, Shewanella benthica; identical to SEQ ID NO: 399
  modified_base (13)..(20): a, c, t or g

SEQ ID NO: 415 - DNA, 32 bp, Shewanella sp. WE21; identical to SEQ ID NO: 399
  modified_base (13)..(20): a, c, t or g

SEQ ID NO: 416 - DNA, 32 bp, Shewanella baltica; identical to SEQ ID NO: 399
  modified_base (13)..(20): a, c, t or g

SEQ ID NO: 417 - DNA, 32 bp, Shewanella sp. SACH; identical to SEQ ID NO: 399
  modified_base (13)..(20): a, c, t or g

SEQ ID NO: 418 - DNA, 32 bp, Shewanella baltica; identical to SEQ ID NO: 399
  modified_base (13)..(20): a, c, t or g

SEQ ID NO: 419 - DNA, 32 bp, Shewanella sp. Pdp11; identical to SEQ ID NO: 399
  modified_base (13)..(20): a, c, t or g

SEQ ID NO: 420 - DNA, 32 bp, Shewanella sp. UCD-KL12; identical to SEQ ID NO: 399
  modified_base (13)..(20): a, c, t or g

SEQ ID NO: 421 - DNA, 32 bp, Shewanella woodyi; identical to SEQ ID NO: 399
  modified_base (13)..(20): a, c, t or g

SEQ ID NO: 422 - DNA, 32 bp, Unknown; identical to SEQ ID NO: 399
  source: /note="Description of Unknown: Unclassified Shewanella sequence"
  modified_base (13)..(20): a, c, t or g

SEQ ID NO: 423 - DNA, 32 bp, Shewanella corallii; identical to SEQ ID NO: 399
  modified_base (13)..(20): a, c, t or g

SEQ ID NO: 424 - DNA, 32 bp, Shewanella sp. Alg231_23; identical to SEQ ID NO: 399
  modified_base (13)..(20): a, c, t or g

SEQ ID NO: 425 - DNA, 32 bp, Shewanella sediminis; identical to SEQ ID NO: 399
  modified_base (13)..(20): a, c, t or g

SEQ ID NO: 426 - DNA, 32 bp, Shewanella canadensis; identical to SEQ ID NO: 399
  modified_base (13)..(20): a, c, t or g

SEQ ID NO: 427 - DNA, 32 bp, Shewanella halifaxensis; identical to SEQ ID NO: 399
  modified_base (13)..(20): a, c, t or g

SEQ ID NO: 428 - DNA, 32 bp, Shewanella fidelis; identical to SEQ ID NO: 399
  modified_base (13)..(20): a, c, t or g

SEQ ID NO: 429 - DNA, 32 bp, Candidatus Omnitrophica bacterium CG1_02_49_10
  modified_base (13)..(20): a, c, t or g
ccgtactatatannnnnnnntatataatgcgg

SEQ ID NO: 430 - DNA, 33 bp, Lactococcus piscium
  modified_base (13)..(21): a, c, t or g
gaaacgttgatannnnnnnnntattaacgtttt

SEQ ID NO: 431 - DNA, 33 bp, Enterococcus sp.; identical to SEQ ID NO: 430
  modified_base (13)..(21): a, c, t or g

SEQ ID NO: 432 - DNA, 31 bp, Bacillus anthracis
  modified_base (13)..(19): a, c, t or g
aaaccctcaacannnnnnntgtcaagggttt

SEQ ID NO: 433 - DNA, 31 bp, Bacillus sp.; identical to SEQ ID NO: 432
  modified_base (13)..(19): a, c, t or g

SEQ ID NO: 434 - DNA, 31 bp, Bacillus sp.; identical to SEQ ID NO: 432
  modified_base (13)..(19): a, c, t or g

SEQ ID NO: 435 - DNA, 31 bp, Unknown; identical to SEQ ID NO: 432
  source: /note="Description of Unknown: Bacillus cereus group"
  modified_base (13)..(19): a, c, t or g

SEQ ID NO: 436 - DNA, 31 bp, Pelobacter propionicus
  modified_base (13)..(19): a, c, t or g
tcggtatatatannnnnnncacatataccga

SEQ ID NO: 437 - DNA, 32 bp, Acidovorax temperans
  modified_base (13)..(20): a, c, t or g
catcaagtgatannnnnnnntatcgcttgatg

SEQ ID NO: 438 - DNA, 32 bp, Unknown
  source: /note="Description of Unknown: Firmicutes sequence"
  modified_base (13)..(20): a, c, t or g
gcagagtgaagannnnnnnntcctcgctctgc

SEQ ID NO: 439 - DNA, 32 bp, Pedobacter sp. Leaf194
  modified_base (13)..(20): a, c, t or g
aaaaacggcatannnnnnnntatgccgttttt

SEQ ID NO: 440 - DNA, 32 bp, Myroides odoratus
  modified_base (13)..(20): a, c, t or g
ttaatgagtagannnnnnnntctactcattaa

SEQ ID NO: 441 - DNA, 32 bp, Myroides profundi; identical to SEQ ID NO: 440
  modified_base (13)..(20): a, c, t or g

SEQ ID NO: 442 - DNA, 34 bp, Psychrobacter arcticus
  modified_base (14)..(21): a, c, t or g
aggttaatatagannnnnnnntttatattaagct

SEQ ID NO: 443 - DNA, 33 bp, Clostridium phage phiCD211
  modified_base (13)..(21): a, c, t or g
ataagacatagannnnnnnnntctatgtcttat

SEQ ID NO: 444 - DNA, 35 bp, Pseudomonas sp. A214
  modified_base (14)..(22): a, c, t or g
ctggcaagccatannnnnnnnntatatcttgccag

SEQ ID NO: 445 - DNA, 35 bp, Pseudomonas fluorescens; identical to SEQ ID NO: 444
  modified_base (14)..(22): a, c, t or g

SEQ ID NO: 446 - DNA, 33 bp, Unknown
  source: /note="Description of Unknown: Unclassified Pseudomonas sequence"
  modified_base (13)..(21): a, c, t or g
tgacccacgatannnnnnnnntatcgtgggtga

SEQ ID NO: 447 - DNA, 32 bp, Weissella paramesenteroides
  modified_base (13)..(20): a, c, t or g
gaagttgggacannnnnnnntgttccaacttc

SEQ ID NO: 448 - DNA, 33 bp, Pseudomonas sp. AP19
  modified_base (13)..(21): a, c, t or g
ttaggtctgatannnnnnnnntatccgacataa

SEQ ID NO: 449 - DNA, 33 bp, Pseudomonas chlororaphis subsp. aureofaciens
  modified_base (13)..(21): a, c, t or g
ttaggtctgatannnnnnnnntatccgacctta

SEQ ID NO: 450 - DNA, 33 bp, Pseudomonas sp. NFIX28; identical to SEQ ID NO: 449
  modified_base (13)..(21): a, c, t or g

SEQ ID NO: 451 - DNA, 33 bp, Pseudomonas chlororaphis subsp. aureofaciens; identical to SEQ ID NO: 449
  modified_base (13)..(21): a, c, t or g

SEQ ID NO: 452 - DNA, 33 bp, Pseudomonas sp. KG01; identical to SEQ ID NO: 449
  modified_base (13)..(21): a, c, t or g

SEQ ID NO: 453 - DNA, 33 bp, Pseudomonas sp. OV286; identical to SEQ ID NO: 449
  modified_base (13)..(21): a, c, t or g

SEQ ID NO: 454 - DNA, 33 bp, Pseudomonas oleovorans; identical to SEQ ID NO: 449
  modified_base (13)..(21): a, c, t or g

SEQ ID NO: 455 - DNA, 33 bp, Pseudomonas chlororaphis subsp. piscium; identical to SEQ ID NO: 449
  modified_base (13)..(21): a, c, t or g

SEQ ID NO: 456 - DNA, 33 bp, Pseudomonas sp.; identical to SEQ ID NO: 449
  modified_base (13)..(21): a, c, t or g

SEQ ID NO: 457 - DNA, 33 bp, Unknown; identical to SEQ ID NO: 449
  source: /note="Description of Unknown: Unclassified Pseudomonas sequence"
  modified_base (13)..(21): a, c, t or g

SEQ ID NO: 458 - DNA, 33 bp, Unknown; identical to SEQ ID NO: 449
  source: /note="Description of Unknown: Unclassified Pseudomonas sequence"
  modified_base (13)..(21): a, c, t or g

SEQ ID NO: 459 - DNA, 33 bp, Pseudomonas sp. 21; identical to SEQ ID NO: 449
  modified_base (13)..(21): a, c, t or g

SEQ ID NO: 460 - DNA, 33 bp, Pseudomonas alkylphenolica; identical to SEQ ID NO: 449
  modified_base (13)..(21): a, c, t or g

SEQ ID NO: 461 - DNA, 33 bp, Pseudomonas aeruginosa 148; identical to SEQ ID NO: 449
  modified_base (13)..(21): a, c, t or g

SEQ ID NO: 462 - DNA, 33 bp, Pseudomonas sp.; identical to SEQ ID NO: 449
  modified_base (13)..(21): a, c, t or g

SEQ ID NO: 463 - DNA, 33 bp, Pseudomonas sp. S06B 330; identical to SEQ ID NO: 449
  modified_base (13)..(21): a, c, t or g

SEQ ID NO: 464 - DNA, 33 bp, Pseudomonas aeruginosa; identical to SEQ ID NO: 449
  modified_base (13)..(21): a, c, t or g

SEQ ID NO: 465 - DNA, 33 bp, Pseudomonas aeruginosa; identical to SEQ ID NO: 449
  modified_base (13)..(21): a, c, t or g

SEQ ID NO: 466 - DNA, 33 bp, Pseudomonas sp. FW507-12TSA
  modified_base (13)..(21): a, c, t or g
tgacagtggatannnnnnnnntatccaatctca

SEQ ID NO: 467 - DNA, 31 bp, Roseivivax lentus
  modified_base (13)..(19): a, c, t or g
ttagttatgatannnnnnngatcataactaa

SEQ ID NO: 468 - DNA, 32 bp, Sulfitobacter pontiacus
  modified_base (13)..(20): a, c, t or g
gctatctgaacannnnnnnntgttcagattga

SEQ ID NO: 469 - DNA, 32 bp, Bacillus okhensis
  modified_base (13)..(20): a, c, t or g
gatgactttacannnnnnnntgtaaagtcatc

SEQ ID NO: 470 - DNA, 31 bp, Aliivibrio salmonicida
  modified_base (13)..(19): a, c, t or g
ctcaatttcacannnnnnntgtgaaattgag

SEQ ID NO: 471 - DNA, 31 bp, Bacillus cereus
  modified_base (13)..(19): a, c, t or g
aaggggaacagannnnnnntccgttcccctt

SEQ ID NO: 472 - DNA, 32 bp, Vibrio crassostreae
  modified_base (13)..(20): a, c, t or g
agctaggtaagannnnnnnntcttacctatgt

SEQ ID NO: 473 - DNA, 32 bp, Alteromonas macleodii
  modified_base (13)..(20): a, c, t or g
gaaatcgtaatannnnnnnntattacgatttg

SEQ ID NO: 474 - DNA, 37 bp, Candidatus Pelagibacter sp. RS40
  modified_base (15)..(23): a, c, t or g
tattactattgatannnnnnnnntatcactagtaata

SEQ ID NO: 475 - DNA, 35 bp, Pelagibacteraceae bacterium GOM-A3
  modified_base (14)..(22): a, c, t or g
attactattgatannnnnnnnntatcactagtaat

SEQ ID NO: 476 - DNA, 31 bp, Serratia fonticola
  modified_base (13)..(19): a, c, t or g
actgagctaatannnnnnntattaattcagt

SEQ ID NO: 477 - DNA, 35 bp, Herminiimonas arsenitoxidans
  modified_base (14)..(22): a, c, t or g
atcacacaggatannnnnnnnntatcctgttttat

SEQ ID NO: 478 - DNA, 33 bp, Mesorhizobium sp.
  modified_base (13)..(21): a, c, t or g
taacgaacgatannnnnnnnntatcattcgttg

SEQ ID NO: 479 - DNA, 33 bp, Mesorhizobium sp. M7A.F.Ca.CA.001.13.1.1; identical to SEQ ID NO: 478
  modified_base (13)..(21): a, c, t or g

SEQ ID NO: 480 - DNA, 32 bp, Sphingobium sp.
  modified_base (13)..(20): a, c, t or g
agaatgggcagannnnnnnntctgacccttct

SEQ ID NO: 481 - DNA, 33 bp, Pseudomonas putida
  modified_base (13)..(21): a, c, t or g
tagctctggagannnnnnnnntctccggagtta

SEQ ID NO: 482 - DNA, 33 bp, Pseudomonas putida; identical to SEQ ID NO: 481
  modified_base (13)..(21): a, c, t or g

SEQ ID NO: 483 - DNA, 31 bp, Noviherbaspirillum autotrophicum
  modified_base (13)..(19): a, c, t or g
aagggctacagannnnnnntctgtaaccctt

SEQ ID NO: 484 - DNA, 31 bp, Acinetobacter johnsonii
  modified_base (13)..(19): a, c, t or g
tgtttgttgatannnnnnntatggacaaaca

SEQ ID NO: 485 - DNA, 32 bp, Klebsiella sp.
  modified_base (13)..(20): a, c, t or g
ccagcgctcagannnnnnnngctgagtgctgg

SEQ ID NO: 486 - DNA, 32 bp, Klebsiella pneumoniae; identical to SEQ ID NO: 485
  modified_base (13)..(20): a, c, t or g

SEQ ID NO: 487 - DNA, 32 bp, Unknown; identical to SEQ ID NO: 485
  source: /note="Description of Unknown: Bacteria sequence"
  modified_base (13)..(20): a, c, t or g

SEQ ID NO: 488 - DNA, 32 bp, Klebsiella pneumoniae; identical to SEQ ID NO: 485
  modified_base (13)..(20): a, c, t or g

SEQ ID NO: 489 - DNA, 32 bp, Klebsiella sp.; identical to SEQ ID NO: 485
  modified_base (13)..(20): a, c, t or g

SEQ ID NO: 490 - DNA, 32 bp, Unknown; identical to SEQ ID NO: 485
  source: /note="Description of Unknown: Enterobacteriaceae sequence"
  modified_base (13)..(20): a, c, t or g

SEQ ID NO: 491 - DNA, 32 bp, Unknown; identical to SEQ ID NO: 485
  source: /note="Description of Unknown: Enterobacteriaceae sequence"
  modified_base (13)..(20): a, c, t or g

SEQ ID NO: 492 - DNA, 32 bp, Klebsiella variicola; identical to SEQ ID NO: 485
  modified_base (13)..(20): a, c, t or g

SEQ ID NO: 493 - DNA, 32 bp, Unknown; identical to SEQ ID NO: 485
  source: /note="Description of Unknown: Enterobacteriaceae sequence"
  modified_base (13)..(20): a, c, t or g

SEQ ID NO: 494 - DNA, 32 bp, Klebsiella sp.; identical to SEQ ID NO: 485
  modified_base (13)..(20): a, c, t or g

SEQ ID NO: 495 - DNA, 32 bp, Unknown; identical to SEQ ID NO: 485
  source: /note="Description of Unknown: Enterobacteriaceae sequence"
  modified_base (13)..(20): a, c, t or g

SEQ ID NO: 496 - DNA, 32 bp, Unknown; identical to SEQ ID NO: 485
  source: /note="Description of Unknown: Enterobacteriaceae sequence"
  modified_base (13)..(20): a, c, t or g

SEQ ID NO: 497 - DNA, 32 bp, Klebsiella pneumoniae; identical to SEQ ID NO: 485
  modified_base (13)..(20): a, c, t or g

SEQ ID NO: 498 - DNA, 32 bp, Klebsiella pneumoniae; identical to SEQ ID NO: 485
  modified_base (13)..(20): a, c, t or g

SEQ ID NO: 499 - DNA, 32 bp, Klebsiella sp.; identical to SEQ ID NO: 485
  modified_base (13)..(20): a, c, t or g

SEQ ID NO: 500 - DNA, 32 bp, Klebsiella pneumoniae; identical to SEQ ID NO: 485
  modified_base (13)..(20): a, c, t or g

SEQ ID NO: 501 - DNA, 32 bp, Klebsiella pneumoniae; identical to SEQ ID NO: 485
  modified_base (13)..(20): a, c, t or g

SEQ ID NO: 502 - DNA, 32 bp, Klebsiella pneumoniae; identical to SEQ ID NO: 485
  modified_base (13)..(20): a, c, t or g

SEQ ID NO: 503 - DNA, 32 bp, Klebsiella pneumoniae; identical to SEQ ID NO: 485
  modified_base (13)..(20): a, c, t or g

SEQ ID NO: 504 - DNA, 32 bp, Shewanella baltica
  modified_base (13)..(20): a, c, t or g
ttaccagtgatannnnnnnntatcactggtag

SEQ ID NO: 505 - DNA, 33 bp, Methylobacterium sp. B34
  modified_base (13)..(21): a, c, t or g
gtacaggtgatannnnnnnnntatcacctgttg

SEQ ID NO: 506 - DNA, 33 bp, Mycobacterium virus Angelica
  modified_base (13)..(21): a, c, t or g
gccctggtcagannnnnnnnntctgaccggggc

SEQ ID NO: 507 - DNA, 33 bp, Thiobaca trueperi
  modified_base (13)..(21): a, c, t or g
taacatgggatannnnnnnnntatcccatgtta

SEQ ID NO: 508 - DNA, 31 bp, Unknown
  source: /note="Description of Unknown: Citrobacter freundii complex"
  modified_base (13)..(19): a, c, t or g
cttacgaatagannnnnnnaatattcgtaag

SEQ ID NO: 509 - DNA, 32 bp, Enterococcus sp.
  modified_base (13)..(20): a, c, t or g
aacggcaaaatannnnnnnntattttgacgtt

SEQ ID NO: 510 - DNA, 33 bp, Pseudomonas aeruginosa
  modified_base (13)..(21): a, c, t or g
tgagcactgatannnnnnnnntatcagtgctta

SEQ ID NO: 511 - DNA, 31 bp, Burkholderia pseudomallei
  modified_base (13)..(19): a, c, t or g
aagcccggtagannnnnnntctaccgggctt

SEQ ID NO: 512 - DNA, 32 bp, Aeromonas veronii
  modified_base (13)..(20): a, c, t or g
caagtatcgatannnnnnnntatcgatattta

SEQ ID NO: 513 - DNA, 32 bp, Aeromonas hydrophila; identical to SEQ ID NO: 512
  modified_base (13)..(20): a, c, t or g

SEQ ID NO: 514 - DNA, 34 bp, Vibrio crassostreae
  modified_base (14)..(21): a, c, t or g
atagtgtgatatannnnnnnntatatcacattat

SEQ ID NO: 515 - DNA, 32 bp, Belliella pelovolcani
  modified_base (13)..(20): a, c, t or g
ggcttagctatannnnnnnngttagctaagcc

SEQ ID NO: 516 - DNA, 32 bp, Luteibacter yeojuensis
  modified_base (13)..(20): a, c, t or g
taatagcgaatannnnnnnntattcgctattg

SEQ ID NO: 517 - DNA, 32 bp, Luteibacter yeojuensis; identical to SEQ ID NO: 516
  modified_base (13)..(20): a, c, t or g

SEQ ID NO: 518 - DNA, 33 bp, Hymenobacter psychrotolerans
  modified_base (13)..(21): a, c, t or g
taaggtatgatannnnnnnnntatcatacctta

SEQ ID NO: 519 - DNA, 33 bp, Hymenobacter rigui; identical to SEQ ID NO: 518
  modified_base (13)..(21): a, c, t or g

SEQ ID NO: 520 - DNA, 33 bp, Hymenobacter sp. IS2118; identical to SEQ ID NO: 518
  modified_base (13)..(21): a, c, t or g

SEQ ID NO: 521 - DNA, 33 bp, Hymenobacter sp. NL; identical to SEQ ID NO: 518
  modified_base (13)..(21): a, c, t or g

SEQ ID NO: 522 - DNA, 33 bp, Hymenobacter perfusus; identical to SEQ ID NO: 518
  modified_base (13)..(21): a, c, t or g

SEQ ID NO: 523 - DNA, 32 bp, Legionella waltersii
  modified_base (13)..(20): a, c, t or g
ttgggatagatannnnnnnntatctaccccaa

SEQ ID NO: 524 - DNA, 32 bp, Actinomyces sp. oral taxon 181
  modified_base (13)..(20): a, c, t or g
agagagtagatannnnnnnngatctactctct

SEQ ID NO: 525 - DNA, 33 bp, Dankookia rubra
  modified_base (13)..(21): a, c, t or g
taacacaccatannnnnnnnntatagcgtgtta

SEQ ID NO: 526 - DNA, 33 bp, Unknown
  source: /note="Description of Unknown: Sphingomonadales sequence"
  modified_base (13)..(21): a, c, t or g
agacatgtgatannnnnnnnntatcacatgttg

SEQ ID NO: 527 - DNA, 33 bp, Staphylococcus phage 2638A
  modified_base (13)..(21): a, c, t or g
tatcccttgatannnnnnnnntttcaaggggta

SEQ ID NO: 528 - DNA, 33 bp, Spirosoma luteum
  modified_base (13)..(21): a, c, t or g
ttatctacgatannnnnnnnntatcgtagataa

SEQ ID NO: 529 - DNA, 33 bp, Rhizobium leguminosarum
  modified_base (13)..(21): a, c, t or g
ctatgtccgatannnnnnnnntatcggacataa

SEQ ID NO: 530 - DNA, 33 bp, Rhizobium leguminosarum bv. viciae; identical to SEQ ID NO: 529
  modified_base (13)..(21): a, c, t or g

SEQ ID NO: 531 - DNA, 33 bp, Octadecabacter arcticus
  modified_base (13)..(21): a, c, t or g
ttatgtccgatannnnnnnnntattggacgtaa

SEQ ID NO: 532 - DNA, 33 bp, Epibacterium mobile; identical to SEQ ID NO: 531
  modified_base (13)..(21): a, c, t or g

SEQ ID NO: 533 - DNA, 33 bp, Pseudomonas vancouverensis
  modified_base (13)..(21): a, c, t or g
tcacacgggatannnnnnnnntaccccgtgtga

SEQ ID NO: 534 - DNA, 32 bp, Blautia sp.
  modified_base (13)..(20): a, c, t or g
aaaaaccacagannnnnnnntctgtggtttct

SEQ ID NO: 535 - DNA, 32 bp, Mycobacterium avium
  modified_base (13)..(20): a, c, t or g
tattgatggatannnnnnnntatccatcaacc

SEQ ID NO: 536 - DNA, 32 bp, Comamonas thiooxydans
  modified_base (13)..(20): a, c, t or g
aaagcccgcagannnnnnnncctgcgggcttt

SEQ ID NO: 537 - DNA, 32 bp, Methylobacterium sp.
  modified_base (13)..(20): a, c, t or g
ttatgaccgatannnnnnnntatcggtcataa

SEQ ID NO: 538 - DNA, 32 bp, Unknown
  source: /note="Description of Unknown: Clostridiales sequence"
  modified_base (13)..(20): a, c, t or g
tggtacaacatannnnnnnntatgttgtataa

SEQ ID NO: 539 - DNA, 31 bp, Unknown
  source: /note="Description of Unknown: Enterobacterales sequence"
  modified_base (13)..(19): a, c, t or g
tagcatgttacannnnnnnagtaacatgcca

SEQ ID NO: 540 - DNA, 31 bp, Unknown; identical to SEQ ID NO: 539
  source: /note="Description of Unknown: Enterobacteriaceae sequence"
  modified_base (13)..(19): a, c, t or g

SEQ ID NO: 541 - DNA, 32 bp, Bdellovibrio exovorus
  modified_base (13)..(20): a, c, t or g
accccaataagannnnnnnntcttgttggggt

SEQ ID NO: 542 - DNA, 33 bp, Dinoroseobacter shibae
  modified_base (13)..(21): a, c, t or g
atatgtccgatannnnnnnnntattggacatag

SEQ ID NO: 543 - DNA, 35 bp, Acinetobacter sp. Root1280
  modified_base (14)..(22): a, c, t or g
gctatgttttacannnnnnnnnaataaaacatagc

SEQ ID NO: 544 - DNA, 32 bp, Patulibacter minatonensis
  modified_base (13)..(20): a, c, t or g
caagtagcgatannnnnnnntattgctactgg

SEQ ID NO: 545 - DNA, 33 bp, Pseudomonas plecoglossicida
  modified_base (13)..(21): a, c, t or g
caccactccagannnnnnnnntctggagtggtc

SEQ ID NO: 546 - DNA, 33 bp, Klebsiella sp.
  modified_base (13)..(21): a, c, t or g
tgtgattccatannnnnnnnntatggaatcaca

SEQ ID NO: 547 - DNA, 32 bp, Unknown
  source: /note="Description of Unknown: uncultured bacterium A1Q1_fos_2004 sequence"
  modified_base (13)..(20): a, c, t or g
tagcttatgatannnnnnnntatcaaaaggta

SEQ ID NO: 548 - DNA, 32 bp, Salinimonas sediminis
  modified_base (13)..(20): a, c, t or g
taaccaacgatannnnnnnntatcgaaggtta

SEQ ID NO: 549 - DNA, 32 bp, Unknown; identical to SEQ ID NO: 548
  source: /note="Description of Unknown: Alteromonadaceae sequence"
  modified_base (13)..(20): a, c, t or g

SEQ ID NO: 550 - DNA, 33 bp, Parageobacillus sp.
  modified_base (13)..(21): a, c, t or g
gggctactaatannnnnnnnnatttagtagccc

SEQ ID NO: 551 - DNA, 34 bp, Kibdelosporangium phytohabitans
  modified_base (14)..(21): a, c, t or g
gaattcatgcatannnnnnnntatgcatgaaacc

SEQ ID NO: 552 - DNA, 31 bp, Sebaldella termitidis
  modified_base (13)..(19): a, c, t or g
catcaaacaatannnnnnntattgcttaatg

SEQ ID NO: 553 - DNA, 32 bp, Sphingobium bisphenolivorans
  modified_base (13)..(20): a, c, t or g
ggatatgtgatannnnnnnntatcacatgttc

SEQ ID NO: 554 - DNA, 33 bp, Arthrobacter sp. QXT-31
  modified_base (13)..(21): a, c, t or g
ggtgtgcacagannnnnnnnntttgtgcacacc

SEQ ID NO: 555 - DNA, 34 bp, Escherichia coli
  modified_base (14)..(21): a, c, t or g
ctaactttaaatannnnnnnntatttaaagttag

SEQ ID NO: 556 - DNA, 34 bp, Escherichia sp. KTE52; identical to SEQ ID NO: 555
  modified_base (14)..(21): a, c, t or g

SEQ ID NO: 557 - DNA, 34 bp, Escherichia coli; identical to SEQ ID NO: 555
  modified_base (14)..(21): a, c, t or g

SEQ ID NO: 558 - DNA, 34 bp, Escherichia coli; identical to SEQ ID NO: 555
  modified_base (14)..(21): a, c, t or g

SEQ ID NO: 559 - DNA, 31 bp, Propionibacterium freudenreichii
  modified_base (13)..(19): a, c, t or g
gccctggtgagannnnnnntctcaccagggc

SEQ ID NO: 560 - DNA, 33 bp, Novosphingobium pentaromativorans US6-1
  modified_base (13)..(21): a, c, t or g
agggtgttgatannnnnnnnntatcaacactgt

SEQ ID NO: 561 - DNA, 33 bp, Novosphingobium pentaromativorans; identical to SEQ ID NO: 560
  modified_base (13)..(21): a, c, t or g

SEQ ID NO: 562 - DNA, 33 bp, Streptomyces sp. CFMR 7
  modified_base (13)..(21): a, c, t or g
atcccccagatannnnnnnnntatctggggaag

SEQ ID NO: 563 - DNA, 33 bp, Nitratireductor sp. ES.061
  modified_base (13)..(21): a, c, t or g
caatgtccgatannnnnnnnntatcggacatta

SEQ ID NO: 564 - DNA, 33 bp, Nitratireductor sp. ES.061; identical to SEQ ID NO: 563
  modified_base (13)..(21): a, c, t or g

SEQ ID NO: 565 - DNA, 33 bp, Nitratireductor aquibiodomus; identical to SEQ ID NO: 563
  modified_base (13)..(21): a, c, t or g

SEQ ID NO: 566 - DNA, 32 bp, Alteromonas lipolytica
  modified_base (13)..(20): a, c, t or g
gcccgcctgagannnnnnnnactcaagcgggc

SEQ ID NO: 567 - DNA, 32 bp, Pantoea rodasii
  modified_base (13)..(20): a, c, t or g
taacttcatatannnnnnnntatatgaagttg

SEQ ID NO: 568 - DNA, 32 bp, Pantoea sp.; identical to SEQ ID NO: 567
  modified_base (13)..(20): a, c, t or g

SEQ ID NO: 569 - DNA, 37 bp, Bacillus thuringiensis
  modified_base (15)..(23): a, c, t or g
tttgtatgtctatannnnnnnnntatagatatactaa

SEQ ID NO: 570 - DNA, 33 bp, Rhizobium sp. BK463
  modified_base (13)..(21): a, c, t or g
tcactatcgatannnnnnnnntatcgatagtga

SEQ ID NO: 571 - DNA, 33 bp, Ensifer sp. AP48; identical to SEQ ID NO: 570
  modified_base (13)..(21): a, c, t or g

SEQ ID NO: 572 - DNA, 33 bp, Mesorhizobium waimense; identical to SEQ ID NO: 570
  modified_base (13)..(21): a, c, t or g

SEQ ID NO: 573 - DNA, 33 bp, Bosea vaviloviae; identical to SEQ ID NO: 570
  modified_base (13)..(21): a, c, t or g

SEQ ID NO: 574 - DNA, 33 bp, Bosea sp. OK403; identical to SEQ ID NO: 570
  modified_base (13)..(21): a, c, t or g

SEQ ID NO: 575 - DNA, 33 bp, Bosea sp. Root483D1; identical to SEQ ID NO: 570
  modified_base (13)..(21): a, c, t or g

SEQ ID NO: 576 - DNA, 33 bp, Bosea sp. BK498; identical to SEQ ID NO: 570
  modified_base (13)..(21): a, c, t or g

SEQ ID NO: 577 - DNA, 33 bp, Sinorhizobium sp. GL28; identical to SEQ ID NO: 570
  modified_base (13)..(21): a, c, t or g

SEQ ID NO: 578 - DNA, 33 bp, Sinorhizobium sp. GL28; identical to SEQ ID NO: 570
  modified_base (13)..(21): a, c, t or g

SEQ ID NO: 579 - DNA, 33 bp, Rhizobium sp. PP-CC-3G-465; identical to SEQ ID NO: 570
  modified_base (13)..(21): a, c, t or g

SEQ ID NO: 580 - DNA, 33 bp, Bosea vaviloviae; identical to SEQ ID NO: 570
  modified_base (13)..(21): a, c, t or g

SEQ ID NO: 581 - DNA, 33 bp, Mesorhizobium sp.; identical to SEQ ID NO: 570
  modified_base (13)..(21): a, c, t or g

SEQ ID NO: 582 - DNA, 33 bp, Chelativorans sp.; identical to SEQ ID NO: 570
  modified_base (13)..(21): a, c, t or g

SEQ ID NO: 583 - DNA, 33 bp, Mesorhizobium sp.; identical to SEQ ID NO: 570
  modified_base (13)..(21): a, c, t or g

SEQ ID NO: 584 - DNA, 33 bp, Mesorhizobium loti; identical to SEQ ID NO: 570
  modified_base (13)..(21): a, c, t or g

SEQ ID NO: 585 - DNA, 33 bp, Mesorhizobium sp.; identical to SEQ ID NO: 570
  modified_base (13)..(21): a, c, t or g

SEQ ID NO: 586 - DNA, 32 bp, Piscirickettsia salmonis
  modified_base (13)..(20): a, c, t or g
ctacttccgatannnnnnnntatcggaagtaa

SEQ ID NO: 587 - DNA, 33 bp, Hymenobacter psychrotolerans
  modified_base (13)..(21): a, c, t or g
taagttatgatannnnnnnnntatcataactta

SEQ ID NO: 588 - DNA, 33 bp, Hymenobacter psychrophilus; identical to SEQ ID NO: 587
  modified_base (13)..(21): a, c, t or g

SEQ ID NO: 589 - DNA, 33 bp, Hymenobacter aerophilus; identical to SEQ ID NO: 587
  modified_base (13)..(21): a, c, t or g

SEQ ID NO: 590 - DNA, 33 bp, Hymenobacter mucosus; identical to SEQ ID NO: 587
  modified_base (13)..(21): a, c, t or g

SEQ ID NO: 591 - DNA, 33 bp, Hymenobacter sp. MIMBbqt21; identical to SEQ ID NO: 587
  modified_base (13)..(21): a, c, t or g

SEQ ID NO: 592 - DNA, 32 bp, Xenorhabdus mauleonii
  modified_base (13)..(20): a, c, t or g
taacataggatannnnnnnntatcccatgtta

SEQ ID NO: 593 - DNA, 31 bp, Bacillus sp.
  modified_base (13)..(19): a, c, t or g
ggcttagggatannnnnnntatctctaagcc

SEQ ID NO: 594 - DNA, 34 bp, Pseudomonas sp. TTU2014-080ASC
  modified_base (14)..(21): a, c, t or g
tttgtggggtagannnnnnnntctgccccacaaa

SEQ ID NO: 595 - DNA, 33 bp, Leptospira interrogans
  modified_base (13)..(21): a, c, t or g
aattaccgaatannnnnnnnntatttggttatt

SEQ ID NO: 596 - DNA, 33 bp, Sinorhizobium meliloti
  modified_base (13)..(21): a, c, t or g
tgactatcgatannnnnnnnntatcgatagtga

SEQ ID NO: 597 - DNA, 34 bp, Paraglaciecola sp. MB-3u-78
  modified_base (14)..(21): a, c, t or g
attattctagatannnnnnnntatctggaataat

SEQ ID NO: 598 - DNA, 33 bp, Hymenobacter sp. PAMC 26554
  modified_base (13)..(21): a, c, t or g
taggtagcgatannnnnnnnntatcactaccta

SEQ ID NO: 599 - DNA, 33 bp, Acinetobacter tjernbergiae
  modified_base (13)..(21): a, c, t or g
gcttgtaaaatannnnnnnnntatcttacaagc

SEQ ID NO: 600 - DNA, 33 bp, Methylocystis rosea
  modified_base (13)..(21): a, c, t or g
ccatgtccgatannnnnnnnntatcggacatga

SEQ ID NO: 601 - DNA, 34 bp, Pectobacterium sp.
  modified_base (14)..(21): a, c, t or g
gacttatctaatannnnnnnntattaaataaatc

SEQ ID NO: 602 - DNA, 33 bp, Alcanivorax pacificus
  modified_base (13)..(21): a, c, t or g
gtggtgggcagannnnnnnnntttgcccaccat

SEQ ID NO: 603 - DNA, 33 bp, Solobacterium moorei
  modified_base (13)..(21): a, c, t or g
ttgagtgttacannnnnnnnntgttacactcac

SEQ ID NO: 604 - DNA, 33 bp, Ponticoccus sp. LZ-14
  modified_base (13)..(21): a, c, t or g
taagatacgatannnnnnnnntatcgtatctaa

SEQ ID NO: 605 - DNA, 32 bp, Enterococcus hermanniensis
  modified_base (13)..(20): a, c, t or g
agctcctttatannnnnnnntataaatcagct

SEQ ID NO: 606 - DNA, 31 bp, Agrobacterium sp. LAD9
  modified_base (13)..(19): a, c, t or g
tcactagcgatannnnnnntatcgatagtga

SEQ ID NO: 607 - DNA, 31 bp, Lactococcus lactis
  modified_base (13)..(19): a, c, t or g
aagttactgacannnnnnntgtcagtaactc

SEQ ID NO: 608 - DNA, 32 bp, Homo sapiens
aataaagggaatatcttatcattccctttatt

SEQ ID NO: 609 - DNA, 32 bp, Homo sapiens; identical to SEQ ID NO: 608

SEQ ID NO: 610 - DNA, 32 bp, Homo sapiens; identical to SEQ ID NO: 608

SEQ ID NO: 611 - DNA, 32 bp, Homo sapiens; identical to SEQ ID NO: 608

SEQ ID NO: 612 - DNA, 32 bp, Homo sapiens; identical to SEQ ID NO: 608

SEQ ID NO: 613 - DNA, 32 bp, Homo sapiens; identical to SEQ ID NO: 608

SEQ ID NO: 614 - DNA, 33 bp, Homo sapiens
tttttttgtatttaaagaggcaaaagaaaaaaa

SEQ ID NO: 615 - DNA, 32 bp, Homo sapiens
tctctatatatatatgagaatatatatagaga

SEQ ID NO: 616 - DNA, 35 bp, Homo sapiens
aaaaataaaactgggaaaaaaatagttttattttt

SEQ ID NO: 617 - DNA, 31 bp, Homo sapiens
cactgatatatatcactgatatatatcagtg

SEQ ID NO: 618 - DNA, 31 bp, Homo sapiens; identical to SEQ ID NO: 617

SEQ ID NO: 619 - DNA, 31 bp, Homo sapiens
caatttttgaaattttcaatttcaaaaattg

SEQ ID NO: 620 - DNA, 31 bp, Homo sapiens; identical to SEQ ID NO: 619

SEQ ID NO: 621 - DNA, 31 bp, Homo sapiens; identical to SEQ ID NO: 619

SEQ ID NO: 622 - DNA, 32 bp, Homo sapiens
taatgttctataatgtggtttataaaacacta

SEQ ID NO: 623 - DNA, 32 bp, Homo sapiens
tgcatatacatatatatgcatatatatatgta

SEQ ID NO: 624 - DNA, 32 bp, Homo sapiens
ttatgtccaatataaagctatattggacataa

SEQ ID NO: 625 - DNA, 32 bp, Homo sapiens; identical to SEQ ID NO: 624

SEQ ID NO: 626 - DNA, 32 bp, Homo sapiens
tgacttcgtataataaactttataggaggcca

SEQ ID NO: 627 - DNA, 32 bp, Homo sapiens; identical to SEQ ID NO: 626

SEQ ID NO: 628 - DNA, 32 bp, Homo sapiens; identical to SEQ ID NO: 624

SEQ ID NO: 629 - DNA, 33 bp, Homo sapiens
gaccacttcagacaagattggtctggaatggtg

SEQ ID NO: 630 - DNA, 32 bp, Homo sapiens
ggacatgtgataattcaattttgcacatgttg

SEQ ID NO: 631 - DNA, 32 bp, Homo sapiens
gcactagctataggaattgggatcactagtgc

SEQ ID NO: 632 - DNA, 31 bp, Homo sapiens
cccctaattagaacacatttctaattatggg

SEQ ID NO: 633 - DNA, 31 bp, Homo sapiens
cagcctcttagcaaaaatttttaaggggctt

SEQ ID NO: 634 - DNA, 33 bp, Homo sapiens
taactagtgatagataacagttatcactagtta

SEQ ID NO: 635 - DNA, 34 bp, Homo sapiens
ctgaagtaagaaatttgcaaatttcttacttcag

SEQ ID NO: 636 - DNA, 34 bp, Homo sapiens
atgacttcgtataataaactttataggaggccat

SEQ ID NO: 637 - DNA, 32 bp, Homo sapiens; identical to SEQ ID NO: 626

SEQ ID NO: 638 - DNA, 32 bp, Homo sapiens; identical to SEQ ID NO: 626

SEQ ID NO: 639 - DNA, 32 bp, Homo sapiens; identical to SEQ ID NO: 626

SEQ ID NO: 640 - DNA, 32 bp, Homo sapiens; identical to SEQ ID NO: 626

SEQ ID NO: 641 - DNA, 32 bp, Homo sapiens; identical to SEQ ID NO: 626

SEQ ID NO: 642 - DNA, 32 bp, Homo sapiens; identical to SEQ ID NO: 626

SEQ ID NO: 643 - DNA, 32 bp, Homo sapiens; identical to SEQ ID NO: 626

SEQ ID NO: 644 - DNA, 32 bp, Homo sapiens; identical to SEQ ID NO: 626

SEQ ID NO: 645 - DNA, 32 bp, Homo sapiens; identical to SEQ ID NO: 626

SEQ ID NO: 646 - DNA, 32 bp, Homo sapiens; identical to SEQ ID NO: 626

SEQ ID NO: 647 - DNA, 33 bp, Homo sapiens
tcatgacctatatacttctggtaccagacataa

SEQ ID NO: 648 - DNA, 35 bp, Homo sapiens
gatttttttaacaaaaaatatataattaaaaaatc

SEQ ID NO: 649 - DNA, 33 bp, Homo sapiens
tgagactgcataaattataaatatcctatctga

SEQ ID NO: 650 - DNA, 33 bp, Homo sapiens; identical to SEQ ID NO: 649

SEQ ID NO: 651 - DNA, 32 bp, Homo sapiens
aagccataaagatggggccttgtgtctggctt

SEQ ID NO: 652 - DNA, 31 bp, Homo sapiens
gcatagtgcacattagacctctgacccaagc

SEQ ID NO: 653 - DNA, 33 bp, Homo sapiens
caaagcaggatattatcaggctatcacgccttt

SEQ ID NO: 654 - DNA, 32 bp, Homo sapiens
ccggcgcagaaagggccgcttgttcgcgccgc

SEQ ID NO: 655 - DNA, 33 bp, Homo sapiens
tggcaagctataaaacaagcataaaacttccca

SEQ ID NO: 656 - DNA, 33 bp, Homo sapiens
aaagaagtgataagaattattcatctctttttt

SEQ ID NO: 657 - DNA, 32 bp, Homo sapiens
ctccttccaataaagccttgtgttggaagtag

SEQ ID NO: 658 - DNA, 32 bp, Homo sapiens; identical to SEQ ID NO: 657

SEQ ID NO: 659 - DNA, 32 bp, Homo sapiens; identical to SEQ ID NO: 657

SEQ ID NO: 660 - DNA, 32 bp, Homo sapiens; identical to SEQ ID NO: 657

SEQ ID NO: 661 - DNA, 32 bp, Homo sapiens; identical to SEQ ID NO: 657

SEQ ID NO: 662 - DNA, 34 bp, Homo sapiens
tctatatactatatataagtatatagtatataga

SEQ ID NO: 663 - DNA, 33 bp, Homo sapiens
tttagtcccacaaatttaaaatatgtgactgct

SEQ ID NO: 664 - DNA, 35 bp, Homo sapiens
tttaggcatcatgatgctggcatatgatccctaaa

SEQ ID NO: 665 - DNA, 32 bp, Homo sapiens
ttaggtctctttttaccttgtaagagacctta

SEQ ID NO: 666 - DNA, 31 bp, Homo sapiens
tcactgtccttatctacaacatggagattga

SEQ ID NO: 667 - DNA, 32 bp, Homo sapiens; identical to SEQ ID NO: 624

SEQ ID NO: 668 - DNA, 32 bp, Homo sapiens; identical to SEQ ID NO: 624

SEQ ID NO: 669 - DNA, 32 bp, Homo sapiens; identical to SEQ ID NO: 624

SEQ ID NO: 670 - DNA, 32 bp, Homo sapiens; identical to SEQ ID NO: 624

SEQ ID NO: 671 - DNA, 32 bp, Homo sapiens; identical to SEQ ID NO: 624

SEQ ID NO: 672 - DNA, 32 bp, Homo sapiens; identical to SEQ ID NO: 624

SEQ ID NO: 673 - DNA, 32 bp, Homo sapiens; identical to SEQ ID NO: 624

SEQ ID NO: 674 - DNA, 32 bp, Homo sapiens; identical to SEQ ID NO: 624

SEQ ID NO: 675 - DNA, 32 bp, Homo sapiens; identical to SEQ ID NO: 624

SEQ ID NO: 676 - DNA, 32 bp, Homo sapiens
ggttgcgacatacaggtatgtatgtcacatac

SEQ ID NO: 677 - DNA, 32 bp, Homo sapiens
tttgagggtatttattttgctataccaacaaa

SEQ ID NO: 678 - DNA, 33 bp, Homo sapiens
ctatgtacattatcttatatttattggacatgt

SEQ ID NO: 679 - DNA, 31 bp, Homo sapiens
tcagccggaaggtggaacttctggcagctgc

SEQ ID NO: 680 - DNA, 32 bp, Homo sapiens
aaaccctacagaattgtacttctgaaggatca

SEQ ID NO: 681 - DNA, 32 bp, Homo sapiens; identical to SEQ ID NO: 680

SEQ ID NO: 682 - DNA, 33 bp, Homo sapiens
ttaggtctgatataaatgaagtctttgacccaa

SEQ ID NO: 683 - DNA, 33 bp, Homo sapiens
ttacttgggatacaaaatctgtacccagtgtga

SEQ ID NO: 684 - DNA, 33 bp, Homo sapiens; identical to SEQ ID NO: 683

SEQ ID NO: 685 - DNA, 32 bp, Homo sapiens
tcctcttacatactttaaaatatgtatgatta

SEQ ID NO: 686 - DNA, 33 bp, Homo sapiens
tatgacttcaaactgttattctctggagtcata

SEQ ID NO: 687 - DNA, 33 bp, Homo sapiens; identical to SEQ ID NO: 686

SEQ ID NO: 688 - DNA, 33 bp, Homo sapiens; identical to SEQ ID NO: 686

SEQ ID NO: 689 - DNA, 33 bp, Homo sapiens; identical to SEQ ID NO: 686

SEQ ID NO: 690 - DNA, 33 bp, Homo sapiens; identical to SEQ ID NO: 686

SEQ ID NO: 691 - DNA, 33 bp, Homo sapiens
ttaagtcaaatatctactagatatcccacctaa

SEQ ID NO: 692 - DNA, 33 bp, Homo sapiens; identical to SEQ ID NO: 691

SEQ ID NO: 693 - DNA, 32 bp, Homo sapiens
ttgcaaggaactgttaagaattttccttgcat

SEQ ID NO: 694 - DNA, 32 bp, Homo sapiens; identical to SEQ ID NO: 693

SEQ ID NO: 695 - DNA, 35 bp, Homo sapiens
cttgataattaataatgaggttattaattaataat

SEQ ID NO: 696 - DNA, 33 bp, Homo sapiens
tcacccacgtcacccttggattatcgtgggtaa

SEQ ID NO: 697 - DNA, 33 bp, Homo sapiens; identical to SEQ ID NO: 696

SEQ ID NO: 698 - DNA, 33 bp, Homo sapiens; identical to SEQ ID NO: 696

SEQ ID NO: 699 - DNA, 31 bp, Homo sapiens
taggaggaaagactttcagtctttccccatt

SEQ ID NO: 700 - DNA, 33 bp, Homo sapiens
tcaagatgaacaaaccacatatgtgttttttga

SEQ ID NO: 701 - DNA, 33 bp, Homo sapiens; identical to SEQ ID NO: 700

SEQ ID NO: 702 - DNA, 32 bp, Homo sapiens
ttaatttgaatataatctgtcattcaagttga

SEQ ID NO: 703 - DNA, 34 bp, Homo sapiens
aatcattcatatatatatatatatattaacattt

SEQ ID NO: 704 - DNA, 32 bp, Homo sapiens
aacaggaacacacacttacacctgctcttgct

SEQ ID NO: 705 - DNA, 36 bp, Homo sapiens
tgagtatttatatatacttgagtatatatatacaca

SEQ ID NO: 706 - DNA, 31 bp, Homo sapiens
tgatcaataacaccaagcctgtcatcaatta

SEQ ID NO: 707 - DNA, 33 bp, Homo sapiens
ttagattcaatatttttgaattattggatgtaa

SEQ ID NO: 708 - DNA, 33 bp, Homo sapiens
ttacatctgataaggatctagtatcgaaaatat

SEQ ID NO: 709 - DNA, 32 bp, Homo sapiens
gccctggtgacaggggagtctctgacctgggc

SEQ ID NO: 710 - DNA, 33 bp, Homo sapiens
gcgtgaggaagagcagcccattctgcatcacgc

SEQ ID NO: 711 - DNA, 33 bp, Homo sapiens
aacccccaaatagttaacctatattaggtggtc

SEQ ID NO: 712 - DNA, 33 bp, Homo sapiens
ttatttcctatattttaagtttataagaaaaaa

SEQ ID NO: 713 - DNA, 31 bp, Homo sapiens
atatttgtcagaaaaaaaatctgacaaagat

SEQ ID NO: 714 - DNA, 32 bp, Homo sapiens
tctatgtacataggtatgtctatgtacataga

SEQ ID NO: 715 - DNA, 32 bp, Homo sapiens; identical to SEQ ID NO: 714

SEQ ID NO: 716 - DNA, 32 bp, Homo sapiens; identical to SEQ ID NO: 714

SEQ ID NO: 717 - DNA, 35 bp, Homo sapiens
attagttatgataaatatgacataacacaagtaat

SEQ ID NO: 718 - DNA, 33 bp, Homo sapiens
aagaaagccatggacatcaattatggcttcatg

SEQ ID NO: 719 - DNA, 32 bp, Homo sapiens
ttccctcagacaatgactgatgtggtgggtaa

SEQ ID NO: 720 - DNA, 32 bp, Homo sapiens
gtacttcccataggtgttggtatctgaagtac

SEQ ID NO: 721 - DNA, 32 bp, Homo sapiens; identical to SEQ ID NO: 720

SEQ ID NO: 722 - DNA, 33 bp, Homo sapiens
ctaagtctgataggacttttttatcagacttag

SEQ ID NO: 723 - DNA, 33 bp, Homo sapiens; identical to SEQ ID NO: 722

SEQ ID NO: 724 - DNA, 33 bp, Homo sapiens; identical to SEQ ID NO: 722

SEQ ID NO: 725 - DNA, 33 bp, Homo sapiens; identical to SEQ ID NO: 722

SEQ ID NO: 726 - DNA, 33 bp, Homo sapiens; identical to SEQ ID NO: 722

SEQ ID NO: 727 - DNA, 31 bp, Homo sapiens
aagcatgaaacagaatgtaagtgccatgcat

SEQ ID NO: 728 - DNA, 32 bp, Homo sapiens
taggtattgatatggtttggtgtccctaccca

SEQ ID NO: 729 - DNA, 32 bp, Homo sapiens
aaataacacagcaactccactctggggtactt

SEQ ID NO: 730 - DNA, 33 bp, Homo sapiens
ttaggttggctaagataagaaaatcagaccaaa

SEQ ID NO: 731 - DNA, 35 bp, Homo sapiens
aataatattgatatcaactaattatcatcagtaat

SEQ ID NO: 732 - DNA, 35 bp, Homo sapiens; identical to SEQ ID NO: 731

SEQ ID NO: 733 - DNA, 33 bp, Homo sapiens
tataacaagatacagcctgtttatcttggtata

SEQ ID NO: 734 - DNA, 35 bp, Homo sapiens
tatacattgtatatacattgtatatacattgtata

SEQ ID NO: 735 - DNA, 32 bp, Homo sapiens
ggaaaacttagaaagaatcttccactttttcc

SEQ ID NO: 736 - DNA, 32 bp, Homo sapiens
gtagtcatgatatttcttactattatgactat

SEQ ID NO: 737 - DNA, 33 bp, Homo sapiens
cactaatagacatagcagtaatatatattaagc

SEQ ID NO: 738 - DNA, 31 bp, Homo sapiens
ggtgccaccacatgtcatgtatggctgcccc

SEQ ID NO: 739 - DNA, 32 bp, Homo sapiens
cgttgggacagatgtgtgtacatgtctgaaag

SEQ ID NO: 740 - DNA, 31 bp, Homo sapiens
taatccttaatactaacactttaacgcataa

SEQ ID NO: 741 - DNA, 33 bp, Homo sapiens
ttactaccaatataacaacactaccagtactaa

SEQ ID NO: 742 - DNA, 33 bp, Homo sapiens; identical to SEQ ID NO: 741

SEQ ID NO: 743 - DNA, 33 bp, Homo sapiens; identical to SEQ ID NO: 741

SEQ ID NO: 744 - DNA, 33 bp, Homo sapiens
ttttttcctatagttttctggtatttgaaatat

SEQ ID NO: 745 - DNA, 31 bp, Homo sapiens
aaaggaccaactttgattttgttgattcttt

SEQ ID NO: 746 - DNA, 31 bp, Homo sapiens
caaatgtagacagtttatatgtcgccttttt

SEQ ID NO: 747 - DNA, 31 bp, Homo sapiens; identical to SEQ ID NO: 746

SEQ ID NO: 748 - DNA, 32 bp, Homo sapiens
taactcctggtaaacaggtctttctggagtca

SEQ ID NO: 749 - DNA, 32 bp, Homo sapiens
ccgtcatggggcttatagtctatccatgaagc

SEQ ID NO: 750 - DNA, 33 bp, Homo sapiens
ttatacatgatatacataacatatcatgtatta

SEQ ID NO: 751 - DNA, 32 bp, Homo sapiens
caaaaggagacaggcatatttttccccttttt

SEQ ID NO: 752 - DNA, 32 bp, Homo sapiens; identical to SEQ ID NO: 751

SEQ ID NO: 753 - DNA, 32 bp, Homo sapiens; identical to SEQ ID NO: 751

SEQ ID NO: 754 - DNA, 32 bp, Homo sapiens; identical to SEQ ID NO: 751

SEQ ID NO: 755 - DNA, 32 bp, Homo sapiens; identical to SEQ ID NO: 751

SEQ ID NO: 756 - DNA, 33 bp, Homo sapiens
ctgggtgctccaggggctctctgtagcactcaa

SEQ ID NO: 757 - DNA, 33 bp, Homo sapiens; identical to SEQ ID NO: 756

SEQ ID NO: 758 - DNA, 31 bp, Homo sapiens
gaacactttataagttatatatgaagggttt

SEQ ID NO: 759 - DNA, 31 bp, Homo sapiens
aaaagatcaataaagcacagattgaattgtt

SEQ ID NO: 760 - DNA, 33 bp, Homo sapiens
ttatttccaataaatcagaattatagcacatga

SEQ ID NO: 761 - DNA, 32 bp, Homo sapiens
aaaaaccacatattataaaatatatggttttt

SEQ ID NO: 762 - DNA, 33 bp, Homo sapiens
tcagttgggatacaattaatgtaacctgtgtga

SEQ ID NO: 763 - DNA, 33 bp, Homo sapiens; identical to SEQ ID NO: 762

SEQ ID NO: 764 - DNA, 33 bp, Homo sapiens; identical to SEQ ID NO: 762

SEQ ID NO: 765 - DNA, 33 bp, Homo sapiens; identical to SEQ ID NO: 762

SEQ ID NO: 766 - DNA, 31 bp, Homo sapiens
aaaatagggataacaatagtatctctatcat

SEQ ID NO: 767 - DNA, 31 bp, Homo sapiens; identical to SEQ ID NO: 766

SEQ ID NO: 768 - DNA, 31 bp, Homo sapiens; identical to SEQ ID NO: 766

SEQ ID NO: 769 - DNA, 32 bp, Homo sapiens
ctcctccgcagaagtctgtgtctggggagcaa

SEQ ID NO: 770 - DNA, 33 bp, Homo sapiens
ttagggaggagacaaggctgttcttttccctcc

SEQ ID NO: 771 - DNA, 32 bp, Homo sapiens
catgtatagatatatatgcatatagatactta

SEQ ID NO: 772 - DNA, 32 bp, Homo sapiens; identical to SEQ ID NO: 771

SEQ ID NO: 773 - DNA, 32 bp, Homo sapiens; identical to SEQ ID NO: 771

SEQ ID NO: 774 - DNA, 32 bp, Homo sapiens; identical to SEQ ID NO: 771

SEQ ID NO: 775 - DNA, 32 bp, Homo sapiens; identical to SEQ ID NO: 771

SEQ ID NO: 776 - DNA, 32 bp, Homo sapiens; identical to SEQ ID NO: 771

SEQ ID NO: 777 - DNA, 32 bp, Homo sapiens; identical to SEQ ID NO: 771

SEQ ID NO: 778 - DNA, 32 bp, Homo sapiens; identical to SEQ ID NO: 771

SEQ ID NO: 779 - DNA, 32 bp, Homo sapiens; identical to SEQ ID NO: 771

SEQ ID NO: 780 - DNA, 32 bp, Homo sapiens; identical to SEQ ID NO: 771

SEQ ID NO: 781 - DNA, 32 bp, Homo sapiens; identical to SEQ ID NO: 771

SEQ ID NO: 782 - DNA, 32 bp, Homo sapiens; identical to SEQ ID NO: 771

SEQ ID NO: 783 - DNA, 32 bp, Homo sapiens; identical to SEQ ID NO: 771

SEQ ID NO: 784 - DNA, 32 bp, Homo sapiens; identical to SEQ ID NO: 771

SEQ ID NO: 785 - DNA, 32 bp, Homo sapiens; identical to SEQ ID NO: 771

SEQ ID NO: 786 - DNA, 32 bp, Homo sapiens; identical to SEQ ID NO: 771

SEQ ID NO: 787 - DNA, 32 bp, Homo sapiens; identical to SEQ ID NO: 771

SEQ ID NO: 788 - DNA, 32 bp, Homo sapiens; identical to SEQ ID NO: 771

SEQ ID NO: 789 - DNA, 32 bp, Homo sapiens; identical to SEQ ID NO: 771

SEQ ID NO: 790 - DNA, 32 bp, Homo sapiens; identical to SEQ ID NO: 771

SEQ ID NO: 791 - DNA, 32 bp, Homo sapiens; identical to SEQ ID NO: 771

SEQ ID NO: 792 - DNA, 32 bp, Homo sapiens; identical to SEQ ID NO: 771

SEQ ID NO: 793 - DNA, 32 bp, Homo sapiens; identical to SEQ ID NO: 771

SEQ ID NO: 794 - DNA, 32 bp, Homo sapiens; identical to SEQ ID NO: 771

SEQ ID NO: 795 - DNA, 32 bp, Homo sapiens; identical to SEQ ID NO: 771

SEQ ID NO: 796 - DNA, 32 bp, Homo sapiens; identical to SEQ ID NO: 771

SEQ ID NO: 797 - DNA, 32 bp, Homo sapiens; identical to SEQ ID NO: 771

SEQ ID NO: 798 - DNA, 32 bp, Homo sapiens; identical to SEQ ID NO: 771

SEQ ID NO: 799 - DNA, 32 bp, Homo sapiens; identical to SEQ ID NO: 771

SEQ ID NO: 800 - DNA, 32 bp, Homo sapiens; identical to SEQ ID NO: 771

SEQ ID NO: 801 - DNA, 32 bp, Homo sapiens; identical to SEQ ID NO: 771

SEQ ID NO: 802 - DNA, 32 bp, Homo sapiens; identical to SEQ ID NO: 771

SEQ ID NO: 803 - DNA, 32 bp, Homo sapiens; identical to SEQ ID NO: 771

SEQ ID NO: 804 - DNA, 32 bp, Homo sapiens; identical to SEQ ID NO: 771

SEQ ID NO: 805 - DNA, 32 bp, Homo sapiens; identical to SEQ ID NO: 771

SEQ ID NO: 806 - DNA, 32 bp, Homo sapiens; identical to SEQ ID NO: 771

SEQ ID NO: 807 - DNA, 32 bp, Homo sapiens; identical to SEQ ID NO: 771

SEQ ID NO: 808 - DNA, 32 bp, Homo sapiens; identical to SEQ ID NO: 771

SEQ ID NO: 809 - DNA, 32 bp, Homo sapiens; identical to SEQ ID NO: 771

SEQ ID NO: 810 - DNA, 32 bp, Homo sapiens; identical to SEQ ID NO: 771

SEQ ID NO: 811 - DNA, 32 bp, Homo sapiens; identical to SEQ ID NO: 771

SEQ ID NO: 812 - DNA, 32 bp, Homo sapiens; identical to SEQ ID NO: 771

SEQ ID NO: 813 - DNA, 32 bp, Homo sapiens; identical to SEQ ID NO: 771

SEQ ID NO: 814 - DNA, 32 bp, Homo sapiens; identical to SEQ ID NO: 771

SEQ ID NO: 815 - DNA, 32 bp, Homo sapiens; identical to SEQ ID NO: 771

SEQ ID NO: 816 - DNA, 32 bp, Homo sapiens; identical to SEQ ID NO: 771

SEQ ID NO: 817 - DNA, 32 bp, Homo sapiens; identical to SEQ ID NO: 771

SEQ ID NO: 818 - DNA, 32 bp, Homo sapiens; identical to SEQ ID NO: 771

SEQ ID NO: 819 - DNA, 32 bp, Homo sapiens; identical to SEQ ID NO: 771

SEQ ID NO: 820 - DNA, 32 bp, Homo sapiens; identical to SEQ ID NO: 771

SEQ ID NO: 821 - DNA, 32 bp, Homo sapiens; identical to SEQ ID NO: 771

SEQ ID NO: 822 - DNA, 32 bp, Homo sapiens; identical to SEQ ID NO: 771

SEQ ID NO: 823 - DNA, 32 bp, Homo sapiens; identical to SEQ ID NO: 771

SEQ ID NO: 824 - DNA, 32 bp, Homo sapiens; identical to SEQ ID NO: 771

SEQ ID NO: 825 - DNA, 32 bp, Homo sapiens; identical to SEQ ID NO: 771

SEQ ID NO: 826 - DNA, 32 bp, Homo sapiens; identical to SEQ ID NO: 771

SEQ ID NO: 827 - DNA, 32 bp, Homo sapiens; identical to SEQ ID NO: 771

SEQ ID NO: 828 - DNA, 32 bp, Homo sapiens; identical to SEQ ID NO: 771

SEQ ID NO: 829 - DNA, 32 bp, Homo sapiens; identical to SEQ ID NO: 771

SEQ ID NO: 830 - DNA, 32 bp, Homo sapiens; identical to SEQ ID NO: 771

SEQ ID NO: 831 - DNA, 32 bp, Homo sapiens; identical to SEQ ID NO: 771

SEQ ID NO: 832 - DNA, 32 bp, Homo sapiens; identical to SEQ ID NO: 771

SEQ ID NO: 833 - DNA, 32 bp, Homo sapiens; identical to SEQ ID NO: 771

SEQ ID NO: 834 - DNA, 32 bp, Homo sapiens; identical to SEQ ID NO: 771

SEQ ID NO: 835 - DNA, 32 bp, Homo sapiens; identical to SEQ ID NO: 771

SEQ ID NO: 836 - DNA, 32 bp, Homo sapiens; identical to SEQ ID NO: 771

SEQ ID NO: 837 - DNA, 32 bp, Homo sapiens; identical to SEQ ID NO: 771

SEQ ID NO: 838 - DNA, 32 bp, Homo sapiens; identical to SEQ ID NO: 771

SEQ ID NO: 839 - DNA, 32 bp, Homo sapiens; identical to SEQ ID NO: 771

SEQ ID NO: 840 - DNA, 32 bp, Homo sapiens; identical to SEQ ID NO: 771

SEQ ID NO: 841 - DNA, 32 bp, Homo sapiens; identical to SEQ ID NO: 771

SEQ ID NO: 842 - DNA, 32 bp, Homo sapiens; identical to SEQ ID NO: 771

SEQ ID NO: 843 - DNA, 32 bp, Homo sapiens; identical to SEQ ID NO: 771

SEQ ID NO: 844 - DNA, 32 bp, Homo sapiens
ccagcccctccagagagccctgatggggctgt

SEQ ID NO: 845 - DNA, 35 bp, Homo sapiens
tgcaaattttacaacctttacttttaatttttcca

SEQ ID NO: 846 - DNA, 32 bp, Homo sapiens
taactatcaatagttactattatcgatagttg

SEQ ID NO: 847 - DNA, 32 bp, Homo sapiens; identical to SEQ ID NO: 846

SEQ ID NO: 848 - DNA, 32 bp, Homo sapiens; identical to SEQ ID NO: 846

SEQ ID NO: 849 - DNA, 32 bp, Homo sapiens; identical to SEQ ID NO: 846

SEQ ID NO: 850 - DNA, 32 bp, Homo sapiens; identical to SEQ ID NO: 846

SEQ ID NO: 851 - DNA, 32 bp, Homo sapiens; identical to SEQ ID NO: 846

SEQ ID NO: 852 - DNA, 32 bp, Homo sapiens; identical to SEQ ID NO: 846

SEQ ID NO: 853 - DNA, 32 bp, Homo sapiens; identical to SEQ ID NO: 846

SEQ ID NO: 854 - DNA, 32 bp, Homo sapiens; identical to SEQ ID NO: 846

SEQ ID NO: 855 - DNA, 32 bp, Homo sapiens; identical to SEQ ID NO: 846

SEQ ID NO: 856 - DNA, 32 bp, Homo sapiens; identical to SEQ ID NO: 846

SEQ ID NO: 857 - DNA, 32 bp, Homo sapiens; identical to SEQ ID NO: 846

SEQ ID NO: 858 - DNA, 32 bp, Homo sapiens; identical to SEQ ID NO: 846

SEQ ID NO: 859 - DNA, 32 bp, Homo sapiens; identical to SEQ ID NO: 846

SEQ ID NO: 860 - DNA, 32 bp, Homo sapiens; identical to SEQ ID NO: 846

SEQ ID NO: 861 - DNA, 32 bp, Homo sapiens; identical to SEQ ID NO: 846

SEQ ID NO: 862 - DNA, 32 bp, Homo sapiens; identical to SEQ ID NO: 846

SEQ ID NO: 863 - DNA, 32 bp, Homo sapiens; identical to SEQ ID NO: 846

SEQ ID NO: 864 - DNA, 32 bp, Homo sapiens; identical to SEQ ID NO: 846

SEQ ID NO: 865 - DNA, 32 bp, Homo sapiens; identical to SEQ ID NO: 846

SEQ ID NO: 866 - DNA, 32 bp, Homo sapiens; identical to SEQ ID NO: 846

SEQ ID NO: 867 - DNA, 32 bp, Homo sapiens; identical to SEQ ID NO: 846

SEQ ID NO: 868 - DNA, 32 bp, Homo sapiens; identical to SEQ ID NO: 846

SEQ ID NO: 869 - DNA, 32 bp, Homo sapiens; identical to SEQ ID NO: 846

SEQ ID NO: 870 - DNA, 32 bp, Homo sapiens; identical to SEQ ID NO: 846

SEQ ID NO: 871 - DNA, 32 bp, Homo sapiens; identical to SEQ ID NO: 846

SEQ ID NO: 872 - DNA, 32 bp, Homo sapiens; identical to SEQ ID NO: 846

SEQ ID NO: 873 - DNA, 32 bp, Homo sapiens; identical to SEQ ID NO: 846

SEQ ID NO: 874 - DNA, 32 bp, Homo sapiens; identical to SEQ ID NO: 846

SEQ ID NO: 875 - DNA, 32 bp, Homo sapiens; identical to SEQ ID NO: 846

SEQ ID NO: 876 - DNA, 32 bp, Homo sapiens; identical to SEQ ID NO: 846

SEQ ID NO: 877 - DNA, 32 bp, Homo sapiens; identical to SEQ ID NO: 846

SEQ ID NO: 878 - DNA, 32 bp, Homo sapiens; identical to SEQ ID NO: 846

SEQ ID NO: 879 - DNA, 32 bp, Homo sapiens; identical to SEQ ID NO: 846

SEQ ID NO: 880 - DNA, 32 bp, Homo sapiens; identical to SEQ ID NO: 846

SEQ ID NO: 881 - DNA, 32 bp, Homo sapiens; identical to SEQ ID NO: 846

SEQ ID NO: 882 - DNA, 32 bp, Homo sapiens; identical to SEQ ID NO: 846

SEQ ID NO: 883 - DNA, 32 bp, Homo sapiens; identical to SEQ ID NO: 846

SEQ ID NO: 884 - DNA, 32 bp, Homo sapiens; identical to SEQ ID NO: 846

SEQ ID NO: 885 - DNA, 32 bp, Homo sapiens; identical to SEQ ID NO: 846

SEQ ID NO: 886 - DNA, 32 bp, Homo sapiens; identical to SEQ ID NO: 846

SEQ ID NO: 887 - DNA, 32 bp, Homo sapiens; identical to SEQ ID NO: 846

SEQ ID NO: 888 - DNA, 32 bp, Homo sapiens; identical to SEQ ID NO: 846

SEQ ID NO: 889 - DNA, 32 bp, Homo sapiens; identical to SEQ ID NO: 846

SEQ ID NO: 890 - DNA, 32 bp, Homo sapiens; identical to SEQ ID NO: 846

SEQ ID NO: 891 - DNA, 32 bp, Homo sapiens; identical to SEQ ID NO: 846

SEQ ID NO: 892 - DNA, 32 bp, Homo sapiens; identical to SEQ ID NO: 846

SEQ ID NO: 893 - DNA, 32 bp, Homo sapiens; identical to SEQ ID NO: 846

SEQ ID NO: 894 - DNA, 32 bp, Homo sapiens; identical to SEQ ID NO: 846

SEQ ID NO: 895 - DNA, 32 bp, Homo sapiens; identical to SEQ ID NO: 846

SEQ ID NO: 896 - DNA, 32 bp, Homo sapiens; identical to SEQ ID NO: 846

SEQ ID NO: 897 - DNA, 32 bp, Homo sapiens; identical to SEQ ID NO: 846

SEQ ID NO: 898 - DNA, 32 bp, Homo sapiens; identical to SEQ ID NO: 846

SEQ ID NO: 899 - DNA, 32 bp, Homo sapiens; identical to SEQ ID NO: 846

SEQ ID NO: 900 - DNA, 32 bp, Homo sapiens; identical to SEQ ID NO: 846

SEQ ID NO: 901 - DNA, 32 bp, Homo sapiens; identical to SEQ ID NO: 846

SEQ ID NO: 902 - DNA, 32 bp, Homo sapiens; identical to SEQ ID NO: 846

SEQ ID NO: 903 - DNA, 32 bp, Homo sapiens; identical to SEQ ID NO: 846

SEQ ID NO: 904 - DNA, 32 bp, Homo sapiens; identical to SEQ ID NO: 846

SEQ ID NO: 905 - DNA, 32 bp, Homo sapiens; identical to SEQ ID NO: 846

SEQ ID NO: 906 - DNA, 32 bp, Homo sapiens; identical to SEQ ID NO: 846

SEQ ID NO: 907 - DNA, 32 bp, Homo sapiens; identical to SEQ ID NO: 846

SEQ ID NO: 908 - DNA, 32 bp, Homo sapiens; identical to SEQ ID NO: 846

SEQ ID NO: 909 - DNA, 32 bp, Homo sapiens; identical to SEQ ID NO: 846

SEQ ID NO: 910 - DNA, 32 bp, Homo sapiens; identical to SEQ ID NO: 846

SEQ ID NO: 911 - DNA, 32 bp, Homo sapiens; identical to SEQ ID NO: 846

SEQ ID NO: 912 - DNA, 32 bp, Homo sapiens; identical to SEQ ID NO: 846

SEQ ID NO: 913 - DNA, 32 bp, Homo sapiens; identical to SEQ ID NO: 846

SEQ ID NO: 914 - DNA, 32 bp, Homo sapiens; identical to SEQ ID NO: 846

SEQ ID NO: 915 - DNA, 32 bp, Homo sapiens; identical to SEQ ID NO: 846

SEQ ID NO: 916 - DNA, 32 bp, Homo sapiens; identical to SEQ ID NO: 846

SEQ ID NO: 917 - DNA, 32 bp, Homo sapiens; identical to SEQ ID NO: 846

SEQ ID NO: 918 - DNA, 32 bp, Homo sapiens; identical to SEQ ID NO: 846

SEQ ID NO: 919 - DNA, 32 bp, Homo sapiens; identical to SEQ ID NO: 846

SEQ ID NO: 920 - DNA, 32 bp, Homo sapiens; identical to SEQ ID NO: 846

SEQ ID NO: 921 - DNA, 32 bp, Homo sapiens; identical to SEQ ID NO: 846

SEQ ID NO: 922 - DNA, 32 bp, Homo sapiens; identical to SEQ ID NO: 846

SEQ ID NO: 923 - DNA, 32 bp, Homo sapiens; identical to SEQ ID NO: 846

SEQ ID NO: 924 - DNA, 32 bp, Homo sapiens; identical to SEQ ID NO: 846

SEQ ID NO: 925 - DNA, 32 bp, Homo sapiens; identical to SEQ ID NO: 846

SEQ ID NO: 926 - DNA, 32 bp, Homo sapiens; identical to SEQ ID NO: 846

SEQ ID NO: 927 - DNA, 32 bp, Homo sapiens; identical to SEQ ID NO: 846

SEQ ID NO: 928 - DNA, 32 bp, Homo sapiens; identical to SEQ ID NO: 846

SEQ ID NO: 929 - DNA, 32 bp, Homo sapiens
ggacacctcaaatcagtctctctgaggagttt

SEQ ID NO: 930 - DNA, 31 bp, Homo sapiens
caagagatcaaactccccttgtagcctcttt

SEQ ID NO: 931 - DNA, 33 bp, Homo sapiens
gtgccacagacattcatgggccatccgtagcac

SEQ ID NO: 932 - DNA, 32 bp, Homo sapiens
gctgagttgagcccagatcttctgaaatcatc

SEQ ID NO: 933 - DNA, 33 bp, Homo sapiens
aaaataaaaataaaaataatttatcgttattta

SEQ ID NO: 934 - DNA, 33 bp, Homo sapiens; identical to SEQ ID NO: 933

SEQ ID NO: 935 - DNA, 33 bp, Homo sapiens
tgactatcgaaaattggaagagatcgttattta

SEQ ID NO: 936 - DNA, 33 bp, Homo sapiens
gaatgtccaataattcaatccaatctgacatta

SEQ ID NO: 937 - DNA, 33 bp, Homo sapiens
gataataagataagtggttattatcttattaaa

SEQ ID NO: 938 - DNA, 32 bp, Homo sapiens
tagctattgatatttaaatttatccaaagttg

SEQ ID NO: 939 - DNA, 32 bp, Homo sapiens; identical to SEQ ID NO: 938

SEQ ID NO: 940 - DNA, 33 bp, Homo sapiens
tcaggttagagttaaccaaattctcgaacatca

SEQ ID NO: 941 - DNA, 33 bp, Homo sapiens
ctacttgagatatttttcagataacacaagtat

SEQ ID NO: 942 - DNA, 35 bp, Homo sapiens
taaagctactatacagaggaactatagtaccattt

SEQ ID NO: 943 - DNA, 32 bp, Homo sapiens
atacaatatacaattaacatagtatattgtat

SEQ ID NO: 944 - DNA, 32 bp, Homo sapiens; identical to SEQ ID NO: 943

SEQ ID NO: 945 - DNA, 33 bp, Homo sapiens
agagtgttgataaattagtgatatcaagtttag

SEQ ID NO: 946 - DNA, 35 bp, Homo sapiens
attattatcgataataatctattatcgataataat

SEQ ID NO: 947 - DNA, 33 bp, Homo sapiens
ttattatcgataataatctattatcgataataa

SEQ ID NO: 948 - DNA, 33 bp, Homo sapiens; identical to SEQ ID NO: 947

SEQ ID NO: 949 - DNA, 33 bp, Homo sapiens; identical to SEQ ID NO: 947

SEQ ID NO: 950 - DNA, 33 bp, Homo sapiens; identical to SEQ ID NO: 947

SEQ ID NO: 951 - DNA, 33 bp, Homo sapiens; identical to SEQ ID NO: 947

SEQ ID NO: 952 - DNA, 33 bp, Homo sapiens
atatgtccaatatggggttaatatctaacatat

SEQ ID NO: 953 - DNA, 33 bp, Homo sapiens; identical to SEQ ID NO: 952

SEQ ID NO: 954 - DNA, 33 bp, Homo sapiens
aaataaatgatagataaggtctatcattcattt

SEQ ID NO: 955 - DNA, 33 bp, Homo sapiens
aaaccctgcataaaaaatgattatggaggtttt

SEQ ID NO: 956 - DNA, 31 bp, Homo sapiens
gggcccgcgagaccgtggggctcaggggccg

SEQ ID NO: 957 - DNA, 31 bp, Homo sapiens
acatagcctatatcttcattatagggttatt

SEQ ID NO: 958 - DNA, 34 bp, Homo sapiens
tatactttacatactttattgtatgtaaattata

SEQ ID NO: 959 - DNA, 33 bp, Homo sapiens
ctacccaagagataaggtcagaatgttgagtcg

SEQ ID NO: 960 - DNA, 35 bp, Homo sapiens
ataagtaatgataaaatattagtatgataaccttt

SEQ ID NO: 961 - DNA, 32 bp, Homo sapiens
ccagtagccacaagtgatagtctagcaaatag

SEQ ID NO: 962 - DNA, 32 bp, Homo sapiens; identical to SEQ ID NO: 961

SEQ ID NO: 963 - DNA, 32 bp, Homo sapiens
tctgtaagaagaaggaacacacttcttacaga

SEQ ID NO: 964 - DNA, 32 bp, Homo sapiens; identical to SEQ ID NO: 963

SEQ ID NO: 965 - DNA, 33 bp, Homo sapiens
ggcggcccggcttgcgcgccctgccgagccgcc

SEQ ID NO: 966 - DNA, 32 bp, Homo sapiens
aacagcccaagaatttgtgttcctcggccatt

SEQ ID NO: 967 - DNA, 33 bp, Homo sapiens
cccttgcaaaggcttcaaccatcatttcaggtg

SEQ ID NO: 968 - DNA, 33 bp, Homo sapiens; identical to SEQ ID NO: 967

SEQ ID NO: 969 - DNA, 33 bp, Homo sapiens; identical to SEQ ID NO: 967

SEQ ID NO: 970 - DNA, 33 bp, Homo sapiens; identical to SEQ ID NO: 967

SEQ ID NO: 971 - DNA, 31 bp, Homo sapiens
gactgagaaagagaaagccactttgtcagtc

SEQ ID NO: 972 - DNA, 32 bp, Homo sapiens
ggcggcgggaggtaccagctgctaccaccgct

SEQ ID NO: 973 - DNA, 33 bp, Homo sapiens
ctacgtctgagaacgtgctcctatcaaacgctt

SEQ ID NO: 974 - DNA, 33 bp, Homo sapiens; identical to SEQ ID NO: 973

SEQ ID NO: 975 - DNA, 33 bp, Homo sapiens; identical to SEQ ID NO: 973

SEQ ID NO: 976 - DNA, 33 bp, Homo sapiens
atatgccagataagggactagtatccagggtat

SEQ ID NO: 977 - DNA, 32 bp, Homo sapiens
aagcttaccataatctgatttatggtaagctt

SEQ ID NO: 978 - DNA, 31 bp, Homo sapiens
ggtagcaactgaaggctggactgtttctacc

SEQ ID NO: 979 - DNA, 33 bp, Homo sapiens
acatgtacaataaactgaacctattggaaatat

SEQ ID NO: 980 - DNA, 32 bp, Homo sapiens
tggatggtgatacagatatttatcatcaactc

SEQ ID NO: 981 - DNA, 31 bp, Homo sapiens
gagcctgggagaaatgcagactctcaggccc

SEQ ID NO: 982 - DNA, 33 bp, Homo sapiens
aaattaccgataatattattctatcattcattt

SEQ ID NO: 983 - DNA, 32 bp, Homo sapiens
tagtgtctgtgtttattagctctcaaacacta

SEQ ID NO: 984 - DNA, 32 bp, Homo sapiens
ggaacccggccatccctctggttcctggttct

SEQ ID NO: 985 - DNA, 33 bp, Homo sapiens
agggtgttgacagcagtgggatatcaccacctt

SEQ ID NO: 986 - DNA, 33 bp, Homo sapiens; identical to SEQ ID NO: 985

SEQ ID NO: 987 - DNA, 33 bp, Homo sapiens
ttaggtcagatacattccaagtattggaaatag

SEQ ID NO: 988 - DNA, 33 bp, Homo sapiens; identical to SEQ ID NO: 987

SEQ ID NO: 989 - DNA, 33 bp, Homo sapiens; identical to SEQ ID NO: 987

SEQ ID NO: 990 - DNA, 33 bp, Homo sapiens
ttggtgggaataaacaaacagtatccaaaccac

SEQ ID NO: 991 - DNA, 32 bp, Homo sapiens
gaatacaacaaatatttttctatgtagcattt

SEQ ID NO: 992 - DNA, 31 bp, Homo sapiens
aactagacaagaactttaataatgtctagtt

SEQ ID NO: 993 - DNA, 31 bp, Homo sapiens; identical to SEQ ID NO: 992

SEQ ID NO: 994 - DNA, 36 bp, Homo sapiens
attaacctcatatatgggatccaaaatgaagttaat

SEQ ID NO: 995 - DNA, 34 bp, Homo sapiens
tcttccagtgataaaacctaaaatcagtggtaga

SEQ ID NO: 996 - DNA, 34 bp, Homo sapiens; identical to SEQ ID NO: 995

SEQ ID NO: 997 - DNA, 34 bp, Homo sapiens; identical to SEQ ID NO: 995

SEQ ID NO: 998 - DNA, 34 bp, Homo sapiens; identical to SEQ ID NO: 995

SEQ ID NO: 999 - DNA, 34 bp, Homo sapiens; identical to SEQ ID NO: 995

SEQ ID NO: 1000 - DNA, 34 bp, Homo sapiens; identical to SEQ ID NO: 995

SEQ ID NO: 1001 - DNA, 34 bp, Homo sapiens; identical to SEQ ID NO: 995

SEQ ID NO: 1002 - DNA, 34 bp, Homo sapiens; identical to SEQ ID NO: 995

SEQ ID NO: 1003 - DNA, 34 bp, Homo sapiens; identical to SEQ ID NO: 995

SEQ ID NO: 1004 - DNA, 34 bp, Homo sapiens; identical to SEQ ID NO: 995

SEQ ID NO: 1005 - DNA, 34 bp, Homo sapiens; identical to SEQ ID NO: 995

SEQ ID NO: 1006 - DNA, 32 bp, Homo sapiens
cttccagtgataaaacctaaaatcagtggtag

SEQ ID NO: 1007 - DNA, 32 bp, Homo sapiens; identical to SEQ ID NO: 1006

SEQ ID NO: 1008 - DNA, 32 bp, Homo sapiens; identical to SEQ ID NO: 1006

SEQ ID NO: 1009 - DNA, 32 bp, Homo sapiens; identical to SEQ ID NO: 1006

SEQ ID NO: 1010 - DNA, 32 bp, Homo sapiens; identical to SEQ ID NO: 1006

SEQ ID NO: 1011 - DNA, 32 bp, Homo sapiens; identical to SEQ ID NO: 1006

SEQ ID NO: 1012 - DNA, 32 bp, Homo sapiens; identical to SEQ ID NO: 1006

SEQ ID NO: 1013 - DNA, 32 bp, Homo sapiens; identical to SEQ ID NO: 1006

SEQ ID NO: 1014 - DNA, 32 bp, Homo sapiens; identical to SEQ ID NO: 1006

SEQ ID NO: 1015 - DNA, 32 bp, Homo sapiens; identical to SEQ ID NO: 1006

SEQ ID NO: 1016 - DNA, 32 bp, Homo sapiens; identical to SEQ ID NO: 1006

SEQ ID NO: 1017 - DNA, 32 bp, Homo sapiens; identical to SEQ ID NO: 1006

SEQ ID NO: 1018 - DNA, 32 bp, Homo sapiens; identical to SEQ ID NO: 1006

SEQ ID NO: 1019 - DNA, 32 bp, Homo sapiens; identical to SEQ ID NO: 1006

SEQ ID NO: 1020 - DNA, 32 bp, Homo sapiens; identical to SEQ ID NO: 1006

SEQ ID NO: 1021 - DNA, 32 bp, Homo sapiens; identical to SEQ ID NO: 1006

SEQ ID NO: 1022 - DNA, 32 bp, Homo sapiens; identical to SEQ ID NO: 1006

SEQ ID NO: 1023 - DNA, 32 bp, Homo sapiens; identical to SEQ ID NO: 1006

SEQ ID NO: 1024 - DNA, 32 bp, Homo sapiens; identical to SEQ ID NO: 1006

SEQ ID NO: 1025 - DNA, 32 bp, Homo sapiens; identical to SEQ ID NO: 1006

SEQ ID NO: 1026 - DNA, 32 bp, Homo sapiens; identical to SEQ ID NO: 1006

SEQ ID NO: 1027 - DNA, 32 bp, Homo sapiens; identical to SEQ ID NO: 1006

SEQ ID NO: 1028 - DNA, 32 bp, Homo sapiens; identical to SEQ ID NO: 1006

SEQ ID NO: 1029 - DNA, 32 bp, Homo sapiens; identical to SEQ ID NO: 1006

SEQ ID NO: 1030 - DNA, 32 bp, Homo sapiens; identical to SEQ ID NO: 1006

SEQ ID NO: 1031 - DNA, 32 bp, Homo sapiens; identical to SEQ ID NO: 1006

SEQ ID NO: 1032 - DNA, 32 bp, Homo sapiens; identical to SEQ ID NO: 1006

SEQ ID NO: 1033 - DNA, 32 bp, Homo sapiens; identical to SEQ ID NO: 1006

SEQ ID NO: 1034 - DNA, 32 bp, Homo sapiens; identical to SEQ ID NO: 1006

SEQ ID NO: 1035 - DNA, 32 bp, Homo sapiens; identical to SEQ ID NO: 1006

SEQ ID NO: 1036 - DNA, 32 bp, Homo sapiens
cgctactatataaagagtaatatataatgcag

SEQ ID NO: 1037 - DNA, 33 bp, Homo sapiens
gaaatgttcataatattcctttattaatgtttt

SEQ ID NO: 1038 - DNA, 33 bp, Homo sapiens; identical to SEQ ID NO: 1037

SEQ ID NO: 1039 - DNA, 31 bp, Homo sapiens
aaaccctcaacaaactaagtatcaaaggtat

SEQ ID NO: 1040 - DNA, 31 bp, Homo sapiens; identical to SEQ ID NO: 1039

SEQ ID NO: 1041 - DNA, 31 bp, Homo sapiens; identical to SEQ ID NO: 1039

SEQ ID NO: 1042 - DNA, 31 bp, Homo sapiens; identical to SEQ ID NO: 1039

SEQ ID NO: 1043 - DNA, 31 bp, Homo sapiens
tctgtatatataagaataacacatattctga

SEQ ID NO: 1044 - DNA, 32 bp, Homo sapiens
cttcaagtgatattatattataccacttgatg

SEQ ID NO: 1045 - DNA, 32 bp, Homo sapiens
tcagagggaagaatacctgctcctggctctgc

SEQ ID NO: 1046 - DNA, 32 bp, Homo sapiens
aaaaatggtataagcttttgtatgcagttttt

SEQ ID NO: 1047 - DNA, 32 bp, Homo sapiens
ttaatgagtacacataattttctactttttaa

SEQ ID NO: 1048 - DNA, 32 bp, Homo sapiens; identical to SEQ ID NO: 1047

SEQ ID NO: 1049 - DNA, 34 bp, Homo sapiens
aggttaaaatagacaaatgggattatatcaagct

SEQ ID NO: 1050 - DNA, 33 bp, Homo sapiens
ataagccatagagcccccatctctgtgtcctat

SEQ ID NO: 1051 - DNA, 35 bp, Homo sapiens
ctggcaaggcataaaggtacgttatatttagccag

SEQ ID NO: 1052 - DNA, 35 bp, Homo sapiens; identical to SEQ ID NO: 1051

SEQ ID NO: 1053 - DNA, 33 bp, Homo sapiens
tgaaccacaatatttctcaactatcttgggtga

SEQ ID NO: 1054 - DNA, 32 bp, Homo sapiens
caggttgggaccatttctgctgttccaacttc

SEQ ID NO: 1055 - DNA, 33 bp, Homo sapiens
ctaggtctgatatcactcatgtatcccacatta

SEQ ID NO: 1056 - DNA, 33 bp, Homo sapiens; identical to SEQ ID NO: 1055

SEQ ID NO: 1057 - DNA, 33 bp, Homo sapiens; identical to SEQ ID NO: 1055

SEQ ID NO: 1058 - DNA, 33 bp, Homo sapiens; identical to SEQ ID NO: 1055

SEQ ID NO: 1059 - DNA, 33 bp, Homo sapiens; identical to SEQ ID NO: 1055

SEQ ID NO: 1060 - DNA, 33 bp, Homo sapiens; identical to SEQ ID NO: 1055

SEQ ID NO: 1061 - DNA, 33 bp, Homo sapiens; identical to SEQ ID NO: 1055

SEQ ID NO: 1062 - DNA, 33 bp, Homo sapiens; identical to SEQ ID NO: 1055

SEQ ID NO: 1063 - DNA, 33 bp, Homo sapiens; identical to SEQ ID NO: 1055

SEQ ID NO: 1064 - DNA, 33 bp, Homo sapiens; identical to SEQ ID NO: 1055

SEQ ID NO: 1065 - DNA, 33 bp, Homo sapiens; identical to SEQ ID NO: 1055

SEQ ID NO: 1066 - DNA, 33 bp, Homo sapiens; identical to SEQ ID NO: 1055

SEQ ID NO: 1067 - DNA, 33 bp, Homo sapiens; identical to SEQ ID NO: 1055

SEQ ID NO: 1068 - DNA, 33 bp, Homo sapiens; identical to SEQ ID NO: 1055

SEQ ID NO: 1069 - DNA, 33 bp, Homo sapiens; identical to SEQ ID NO: 1055

SEQ ID NO: 1070 - DNA, 33 bp, Homo sapiens; identical to SEQ ID NO: 1055

SEQ ID NO: 1071 - DNA, 33 bp, Homo sapiens; identical to SEQ ID NO: 1055

SEQ ID NO: 1072 - DNA, 33 bp, Homo sapiens; identical to SEQ ID NO: 1055

SEQ ID NO: 1073 - DNA, 33 bp, Homo sapiens
tgaaagtggagaaataagaacaatccaatctca

SEQ ID NO: 1074 - DNA, 31 bp, Homo sapiens
ttagttattataactttcctattataactaa

SEQ ID NO: 1075 - DNA, 32 bp, Homo sapiens
gctatatgaacagacgttaatgttcatattca

SEQ ID NO: 1076 - DNA, 32 bp, Homo sapiens
gatgactttaccctatttcttgtgaagtgatc

SEQ ID NO: 1077 - DNA, 31 bp, Homo sapiens
ctcaattacacacctgagatttgaaattcag

SEQ ID NO: 1078 - DNA, 31 bp, Homo sapiens
aagaggaacagatattctttcccttcccatt

SEQ ID NO: 1079 - DNA, 32 bp, Homo sapiens
agataggtaagatttaggattcttatccatgt

SEQ ID NO: 1080 - DNA, 32 bp, Homo sapiens
gaaatattaataactgaaagtattacgttttg

SEQ ID NO: 1081 - DNA, 37 bp, Homo sapiens
tataactagtgatagataacagttatcactagttata

SEQ ID NO: 1082 - DNA, 35 bp, Homo sapiens
ataactagtgatagataacagttatcactagttat

SEQ ID NO: 1083 - DNA, 31 bp, Homo sapiens
actgaataaatatttaagatattaattcagt

SEQ ID NO: 1084 - DNA, 35 bp, Homo sapiens
aacaaacaggatataaagtggtaatcctgttttat

SEQ ID NO: 1085 - DNA, 33 bp, Homo sapiens
taactaacgatacttctcagatataattccttg

SEQ ID NO: 1086 - DNA, 33 bp, Homo sapiens; identical to SEQ ID NO: 1085

SEQ ID NO: 1087 - DNA, 32 bp, Homo sapiens
agaatgggcagaaagaatgttctgggacttct

SEQ ID NO: 1088 - DNA, 33 bp, Homo sapiens
tagctctggagatagagaggcccttcagagtta

SEQ ID NO: 1089 - DNA, 33 bp, Homo sapiens; identical to SEQ ID NO: 1088

SEQ ID NO: 1090 - DNA, 31 bp, Homo sapiens
gagggctgaagacagaggctctgtaaccctt

SEQ ID NO: 1091 - DNA, 31 bp, Homo sapiens
tctttgttgataagtattttttgtacaaaca

SEQ ID NO: 1092 - DNA, 32 bp, Homo sapiens
ccagagcacagaggccaaggggtgagtgctgg

SEQ ID NO: 1093 - DNA, 32 bp, Homo sapiens; identical to SEQ ID NO: 1092

SEQ ID NO: 1094 - DNA, 32 bp, Homo sapiens; identical to SEQ ID NO: 1092

SEQ ID NO: 1095 - DNA, 32 bp, Homo sapiens; identical to SEQ ID NO: 1092

SEQ ID NO: 1096 - DNA, 32 bp, Homo sapiens; identical to SEQ ID NO: 1092

SEQ ID NO: 1097 - DNA, 32 bp, Homo sapiens; identical to SEQ ID NO: 1092

SEQ ID NO: 1098 - DNA, 32 bp, Homo sapiens; identical to SEQ ID NO: 1092

SEQ ID NO: 1099 - DNA, 32 bp, Homo sapiens; identical to SEQ ID NO: 1092

SEQ ID NO: 1100 - DNA, 32 bp, Homo sapiens; identical to SEQ ID NO: 1092

SEQ ID NO: 1101 - DNA, 32 bp, Homo sapiens; identical to SEQ ID NO: 1092

SEQ ID NO: 1102 - DNA, 32 bp, Homo sapiens; identical to SEQ ID NO: 1092

SEQ ID NO: 1103 - DNA, 32 bp, Homo sapiens; identical to SEQ ID NO: 1092

SEQ ID NO: 1104 - DNA, 32 bp, Homo sapiens; identical to SEQ ID NO: 1092

SEQ ID NO: 1105 - DNA, 32 bp, Homo sapiens; identical to SEQ ID NO: 1092

SEQ ID NO: 1106 - DNA, 32 bp, Homo sapiens; identical to SEQ ID NO: 1092

SEQ ID NO: 1107 - DNA, 32 bp, Homo sapiens; identical to SEQ ID NO: 1092

SEQ ID NO: 1108 - DNA, 32 bp, Homo sapiens; identical to SEQ ID NO: 1092

SEQ ID NO: 1109 - DNA, 32 bp, Homo sapiens; identical to SEQ ID NO: 1092

SEQ ID NO: 1110 - DNA, 32 bp, Homo sapiens; identical to SEQ ID NO: 1092

SEQ ID NO: 1111 - DNA, 32 bp, Homo sapiens
ttaccagtgaaagaagataataaaactggtag

SEQ ID NO: 1112 - DNA, 33 bp, Homo sapiens
gtacaggtgatacatactggatatcccctgata

SEQ ID NO: 1113 - DNA, 33 bp, Homo sapiens
gccgtggccagagtgtgcagctctgacctgggc

SEQ ID NO: 1114 - DNA, 33 bp, Homo sapiens
taaaatatgataccttcagtgtatcccatgtta

SEQ ID NO: 1115 - DNA, 31 bp, Homo sapiens
cttacgaataaacacaactaacattagtaag

SEQ ID NO: 1116 - DNA, 32 bp, Homo sapiens
aatggcaaaataaatgggggtattttgatatt

SEQ ID NO: 1117 - DNA, 33 bp, Homo sapiens
tgagcactaatcccaaaatcttatcattgctta

SEQ ID NO: 1118 - DNA, 31 bp, Homo sapiens
tagcccggtagaggtgaggtcttcagggctt

SEQ ID NO: 1119 - DNA, 32 bp, Homo sapiens
taagtatctatatttctatatatagatattta

SEQ ID NO: 1120 - DNA, 32 bp, Homo sapiens; identical to SEQ ID NO: 1119

SEQ ID NO: 1121 - DNA, 34 bp, Homo sapiens
atagtgtaatataatataaattatataacaatat

SEQ ID NO: 1122 - DNA, 32 bp, Homo sapiens
ggcttagcaataaacctattgttacataagcc

SEQ ID NO: 1123 - DNA, 32 bp, Homo sapiens
taatagtgaatatgcattcatattcactatta

SEQ ID NO: 1124 - DNA, 32 bp, Homo sapiens; identical to SEQ ID NO: 1123

SEQ ID NO: 1125 - DNA, 33 bp, Homo sapiens
gaagatattatattatctgtatatcatacctta

SEQ ID NO: 1126 - DNA, 33 bp, Homo sapiens; identical to SEQ ID NO: 1125

SEQ ID NO: 1127 - DNA, 33 bp, Homo sapiens; identical to SEQ ID NO: 1125

SEQ ID NO: 1128 - DNA, 33 bp, Homo sapiens; identical to SEQ ID NO: 1125

SEQ ID NO: 1129 - DNA, 33 bp, Homo sapiens; identical to SEQ ID NO: 1125

SEQ ID NO: 1130 - DNA, 32 bp, Homo sapiens
ctgagatatatatacaaagatatctaccccaa

SEQ ID NO: 1131 - DNA, 32 bp, Homo sapiens
agagagtatatatatatatagatatactatct

SEQ ID NO: 1132 - DNA, 33 bp, Homo sapiens
aaacacaccatattcccttcatagagcgtatta

SEQ ID NO: 1133 - DNA, 33 bp, Homo sapiens
ggacaagtgttatttaattcctatcacatgttg

SEQ ID NO: 1134 - DNA, 33 bp, Homo sapiens
aatcccttgaaattgtcagtatttcaagggtta

SEQ ID NO: 1135 - DNA, 33 bp, Homo sapiens
ttatctaggataggaaatccttattctagataa

SEQ ID NO: 1136 - DNA, 33 bp, Homo sapiens
ctatgtccgatttcttctcattattggacttaa

SEQ ID NO: 1137 - DNA, 33 bp, Homo sapiens; identical to SEQ ID NO: 1136

SEQ ID NO: 1138 - DNA, 33 bp, Homo sapiens; identical to SEQ ID NO: 1136

SEQ ID NO: 1139 - DNA, 33 bp, Homo sapiens; identical to SEQ ID NO: 1136

SEQ ID NO: 1140 - DNA, 33 bp, Homo sapiens
tctcacaggatactacactgttacccagtgtga

SEQ ID NO: 1141 - DNA, 32 bp, Homo sapiens
aaaaacaacagaaccccttttcagtgctttct

SEQ ID NO: 1142 - DNA, 32 bp, Homo sapiens
tattgatggaaattctgcaatatccatccaac

SEQ ID NO: 1143 - DNA, 32 bp, Homo sapiens
aaaagccgcagagggctcagcctgccggcttt

SEQ ID NO: 1144 - DNA, 32 bp, Homo sapiens
ttatgacggataactgggcatatttgtcataa

SEQ ID NO: 1145 - DNA, 32 bp, Homo sapiens
aggtacaatataagccaagatatgttttataa

SEQ ID NO: 1146 - DNA, 31 bp, Homo sapiens
tagcaagttaaagtacgaaagtaacatgcaa

SEQ ID NO: 1147 - DNA, 31 bp, Homo sapiens; identical to SEQ ID NO: 1146

SEQ ID NO: 1148 - DNA, 32 bp, Homo sapiens
accccaatgagaaaatactttctcgttgggga

SEQ ID NO: 1149 - DNA, 33 bp, Homo sapiens
atatgtctgacattccttaggtattggacataa

SEQ ID NO: 1150 - DNA, 35 bp, Homo sapiens
aatatgttttacattacaacacaatataacatagc

SEQ ID NO: 1151 - DNA, 32 bp, Homo sapiens
gaagtagaaataggaatttatattgctactgg

SEQ ID NO: 1152 - DNA, 33 bp, Homo sapiens
caccactgcagactgaagtgctctggtgtggta

SEQ ID NO: 1153 - DNA, 33 bp, Homo sapiens
tgtgagttcatacatttccaatatggtatcaca

SEQ ID NO: 1154 - DNA, 32 bp, Homo sapiens
tagcttaaaatagatttacctatcaaaagcta

SEQ ID NO: 1155 - DNA, 32 bp, Homo sapiens
taactaacaatattcttatttatcgaagttta

SEQ ID NO: 1156 - DNA, 32 bp, Homo sapiens; identical to SEQ ID NO: 1155

SEQ ID NO: 1157 - DNA, 33 bp, Homo sapiens
gggctacttatagaattctatatttactagacc

SEQ ID NO: 1158 - DNA, 34 bp, Homo sapiens
gaattaatgcataggttgatatatgcagaaaacc

SEQ ID NO: 1159 - DNA, 31 bp, Homo sapiens
aatcatacaatatatgacatattgcttaatt

SEQ ID NO: 1160 - DNA, 32 bp, Homo sapiens
ggatatgtgattaccataattctcacatgtac

SEQ ID NO: 1161 - DNA, 33 bp, Homo sapiens
gatgtgcaaaaactttggcattttgtgcacacc

SEQ ID NO: 1162 - DNA, 34 bp, Homo sapiens
ctaacttaaattttacttttctatttaaagttag

SEQ ID NO: 1163 - DNA, 34 bp, Homo sapiens; identical to SEQ ID NO: 1162

SEQ ID NO: 1164 - DNA, 34 bp, Homo sapiens; identical to SEQ ID NO: 1162

SEQ ID NO: 1165 - DNA, 34 bp, Homo sapiens; identical to SEQ ID NO: 1162

SEQ ID NO: 1166 - DNA, 31 bp, Homo sapiens
gccctggtgagagtcccatgcccacaagggc

SEQ ID NO: 1167 - DNA, 33 bp, Homo sapiens
atggtgatgataataattcctaatcaacactgt

SEQ ID NO: 1168 - DNA, 33 bp, Homo sapiens; identical to SEQ ID NO: 1167

SEQ ID NO: 1169 - DNA, 33 bp, Homo sapiens
atctcccagatgatctaagattatctggagaag

SEQ ID NO: 1170 - DNA, 33 bp, Homo sapiens
caatctcctatactttgattttataggacatta

SEQ ID NO: 1171 - DNA, 33 bp, Homo sapiens; identical to SEQ ID NO: 1170

SEQ ID NO: 1172 - DNA, 33 bp, Homo sapiens; identical to SEQ ID NO: 1170

SEQ ID NO: 1173 - DNA, 32 bp, Homo sapiens
gtctgcctgagagggtataaactcaagagggc

SEQ ID NO: 1174 - DNA, 32 bp, Homo sapiens
tacatttatatataaatgtatatatgaagttg

SEQ ID NO: 1175 - DNA, 32 bp, Homo sapiens; identical to SEQ ID NO: 1174

SEQ ID NO: 1176 - DNA, 37 bp, Homo sapiens
tttgtatgtatatacacaaaatatatgcatatactaa

SEQ ID NO: 1177 - DNA, 33 bp, Homo sapiens
tcaatatctatatatagtttatatctatagtga

SEQ ID NO: 1178 - DNA, 33 bp, Homo sapiens; identical to SEQ ID NO: 1177

SEQ ID NO: 1179 - DNA, 33 bp, Homo sapiens; identical to SEQ ID NO: 1177

SEQ ID NO: 1180 - DNA, 33 bp, Homo sapiens; identical to SEQ ID NO: 1177

SEQ ID NO: 1181 - DNA, 33 bp, Homo sapiens; identical to SEQ ID NO: 1177

SEQ ID NO: 1182 - DNA, 33 bp, Homo sapiens; identical to SEQ ID NO: 1177

SEQ ID NO: 1183 - DNA, 33 bp, Homo sapiens; identical to SEQ ID NO: 1177

SEQ ID NO: 1184 - DNA, 33 bp, Homo sapiens; identical to SEQ ID NO: 1177

SEQ ID NO: 1185 - DNA, 33 bp, Homo sapiens; identical to SEQ ID NO: 1177

SEQ ID NO: 1186 - DNA, 33 bp, Homo sapiens; identical to SEQ ID NO: 1177

SEQ ID NO: 1187 - DNA, 33 bp, Homo sapiens; identical to SEQ ID NO: 1177

SEQ ID NO: 1188 - DNA, 33 bp, Homo sapiens; identical to SEQ ID NO: 1177

SEQ ID NO: 1189 - DNA, 33 bp, Homo sapiens; identical to SEQ ID NO: 1177

SEQ ID NO: 1190 - DNA, 33 bp, Homo sapiens; identical to SEQ ID NO: 1177

SEQ ID NO: 1191 - DNA, 33 bp, Homo sapiens; identical to SEQ ID NO: 1177

SEQ ID NO: 1192 - DNA, 33 bp, Homo sapiens; identical to SEQ ID NO: 1177

SEQ ID NO: 1193 - DNA, 32 bp, Homo sapiens
ctacttcagatataacaaaatatccgaagaaa

SEQ ID NO: 1194 - DNA, 33 bp, Homo sapiens
taagttatgataatagaagtttataattacttg

SEQ ID NO: 1195 - DNA, 33 bp, Homo sapiens; identical to SEQ ID NO: 1194

SEQ ID NO: 1196 - DNA, 33 bp, Homo sapiens; identical to SEQ ID NO: 1194

SEQ ID NO: 1197 - DNA, 33 bp, Homo sapiens; identical to SEQ ID NO: 1194

SEQ ID NO: 1198 - DNA, 33 bp, Homo sapiens; identical to SEQ ID NO: 1194

SEQ ID NO: 1199 - DNA, 32 bp, Homo sapiens
taacatgagataagccactaaatcccatgtta

SEQ ID NO: 1200 - DNA, 31 bp, Homo sapiens
ggtttagggatacatgggcagtctctaagcc

SEQ ID NO: 1201 - DNA, 34 bp, Homo sapiens
tttgtggggcagggagattttcctgccccacaaa

SEQ ID NO: 1202 - DNA, 33 bp, Homo sapiens
aattacagaagaggtgaaagatatttggttttt

SEQ ID NO: 1203 - DNA, 33 bp, Homo sapiens
tgactatccataaagaggctatagcgatagaga

SEQ ID NO: 1204 - DNA, 34 bp, Homo sapiens
attattatagttacatagttttatctggaagaat

SEQ ID NO: 1205 - DNA, 33 bp, Homo sapiens
tatgtggctatatttgttttctatcactaccta

SEQ ID NO: 1206 - DNA, 33 bp, Homo sapiens
ccttgtaaaatatgaaatggttatctgacaatc

SEQ ID NO: 1207 - DNA, 33 bp, Homo sapiens
ccatttcagatagagaacatgtattggacatga

SEQ ID NO: 1208 - DNA, 34 bp, Homo sapiens
gacttatttaataaatagacttatttaataaata

SEQ ID NO: 1209 - DNA, 33 bp, Homo sapiens
atggtgggcataggactattgtatgcccaccat

SEQ ID NO: 1210 - DNA, 33 bp, Homo sapiens
ttaagtgttacacatattttattttaccctcac

SEQ ID NO: 1211 - DNA, 33 bp, Homo sapiens
taacatgcgatatatactatatatcgtatataa

SEQ ID NO: 1212 - DNA, 32 bp, Homo sapiens
agctcctctatgattaaaactaaaaatcagct

SEQ ID NO: 1213 - DNA, 31 bp, Homo sapiens
tcactagagatagactctttatgcatagtga

SEQ ID NO: 1214 - DNA, 31 bp, Homo sapiens
aagttactgagatgcaagatgtcaaaaactc

SEQ ID NO: 1215 - protein, 403 aa, Aggregatibacter segnis
MAKKVKPLVDTEIKKAKASDKPYTLTDGYGLFLIISPTGSKSWRFNYYRPLTKKRAKIALGVYPAITLSKARELREQYRQLLALKIDPQEHIKQNELLQLQRQQNTFFAIATQWKQKKVSEIKEATLKSRWRTIEKYVFPYLGDNPIADITPQQLHDIAMPLFERGVSHTGKLVIALVNEIMGFAVNKGVIEFNKCVNVSKAFNVNRTTHHPTIRPEQLPEFMSALRNSHIDLMVKYLIEFSLLTMTRPSEAANALWDEIDFEKSLWNIPAERMKMKKAFTVPLSPQVLKILNKLKNISGRSRFIFQSQRYPERSLHSSSANAAIKRVGYKDQLTSHGLRSIASTYLSETFTEMNLEILEACLSHQSKNQVRNAYNRSTYLEQRKLLMNAWGNFVEECMKKSI

SEQ ID NO: 1216 - protein, 399 aa, Aggregatibacter segnis
MLTDTKIKSLKPKDKVYKVADRDGLYVSVSTAGTITFRYDYRINGRRETLTIGKYGADGINLAEARERLMIARKQVSEGISPATEKRAERNKIRNADRFCVFAEKYLADVQLADSTKALRVATYERDIKDTFGNRLMTEITADEIRSHCEKIKERGAPSTAIFVRDLIANVYRYAIQRGHKFANPADEIANSSIATFKKRERVLTPREIKLFFNTLEETQSDFALKKAVKFILLTMVRKGELVNATWNEVDFKNKVWTIPAERMKAKRAHNVYLSEQALDLIIAFQIYSEGSPYLLPGRINRRQPIANSSLNRVIANCIKFINKDEQRIDEFTVHDLRRTGSTLLHEMGFNSDWIEKSLAHEQQGVRAVYNKAEYAEQRKEMMQRWADQVDEWINDNSL

SEQ ID NO: 1217 - protein, 398 aa, Aggregatibacter segnis
MPKITKPLTNTEVERSKPKAKEYTLTDGYGLFLLVLPTGVKSWRFNYIRPLTKKRTKVSLGTYPALSLAQARSIREEYRSLLAQGIDPQEHKEQEQKAAIEHIENSLLSVANRWKAKKVQKVEAETLKKDWRRMEIYLFPFIGDMPINEILPKVVIEALESLYNQGKGDTLKRTIRLLNEVLNFAVNYGLIAFNPCLRINEVFNFGKSTNNPAITPKELPELIKAVMYSSAAIQTKLLFKFQLLTMVRPAEASNATWSEIDFKKSLWTIPANRMKKRHPFVIPLSSQAMAILNKMKSISVKSEYVFQSWIKSNQPMSSQTINKMLVDLGYKNKQTAHGLRTIGHTYLADLRIDYEVAEMCISHKTGTQTGKIYDRADFLEQRKPVMQLWGDYVEQCER

SEQ ID NO: 1218 - protein, 297 aa, Aggregatibacter segnis
MNDLTLLDLFLNELWIGKGLSPNTVQSYRLDLTALCDWLGERKLSLLDLDSVDLQTFLGERVEQGYKATSTARLLSAIRKLFQYLYQEKYRTDDPSAVLSSPKLPSRLPKYLTEQQVTDLLNVQSLEQPIELRDKAMLELLYATGLRVTELVSLHTDSISLNQGVVRVIGKGNKERIVPMGEEATHWVKQFMLFARPILLDGQSSDVLFPSRRGTQMTRQTFWHRIKHYAVLAEIDSNMLSPHVLRHAFATHLVNHGADLRVVQMLLGHSDLSTTQIYTHVAKERLKRLHERYHPRG

SEQ ID NO: 1219 - protein, 297 aa, Aggregatibacter segnis
MNDLTLLDLFLNELWIGKGLSPNTVQSYRLDLTALCDWLSERKLSLLDLDSVDLQTFLGERVEQGYKATSTARLLSAIRKLFQYLYQEKYRTDDPSAVLSSPKLPSRLPKYLTEQQVTDLLNVQSLEQPIELRDKAMLELLYATGLRVTELVSLHTDSISLNQGVVRVIGKGNKERIVPMGEEATHWVKQFMLFARPILLNGQSSDVLFPSRRGTQMTRQTFWHRIKHYAVLAEIDSNMLSPHVLRHAFATHLVNHGADLRVVQMLLGHSDLSTTQIYTHVAKERLKRLHERYHPRG

SEQ ID NO: 1220 - protein, 296 aa, Aggregatibacter segnis
MQNELQKYLTYLRIERQVSPHTLTNYQHQLVRVIAILQDAGIQQWQQVTLSVVRYVLAQSSKQDGLKEKSLALRLSALRRFLSYLVYQGQLKVNPAVGVSAPKQPKHLPKNIDRDQIQLLLANDSKEPIDIRDRAMIELFYSSGLRLSELQGLNLNSINLRVREVRVIGKGNKERIVPLGRYASHAIQQWLKVRLLFNPKDDALFVSQLGNRMSTRTIQMRLERWGIRQGLNSHLNPHKLRHSFATHMLEASSDLRAVQELLGHSHLSTTQIYTHLNFQHLADVYDAAHPRAKRKK

SEQ ID NO: 1221 - protein, 295 aa, Thermohalobacter berrensis
MESIVLKFIEYLKNEKELSKNTIESYNRDLRQFKEYISDNKINDITGVNKTAIIKYLMHLQKIGKSTSTVSRNLASLRSFYQYLLNKGIINQDPTLNLQSPKPEKKLPDILTPKEVDILLRQPDITTSKGIRDKAMLELLYASGIRVSELIDLNLEDINLDLGYLVCSKNNSNERIIPIGKIALNILKTYIKDYRKKFIKDKNVKSLFVNYHGNKMTRQGFWKIVKSYAKKANINKKITPHTLRHSFATHLLQNGADLKSVQEMLGHSDISTTQVYAQITKNNIKEVYKKAHPRA

SEQ ID NO: 1222 - protein, 377 aa, Clostridium botulinum
MRVQEVKLENNQRRYLLVDDIGLPVIPVAKYLKYIDNSGKSFNTQKTYCYSLKLYFEYLQEIAVDYRSVNINILSDFVGWLRNPYANNKVVNLKPTIAKRTEKTVNLTVTVVTNFYDYLYRTEELNNDMIDKLMKQVFTGGNKHYKDFLYHINKDKPTNKNILKIKEPRRKIKVLTKEEIQSVYNATTNIRDEFLIKLLFEAGLRMGEALSLFIEDIIFDHNNGHRIRLVNRGELPNGARLKTGEREIHISQELIDLFDDYAYDILDELEIDTNFVFVKLRGKNKGTPLEYQDVSDLFKRLKKKTGIDVHAHLLRHTHATIYYQTTKDIKQVQERLGHSQIQTTMNMYLHPSDEDMRANWEIAQPSFKITKRGTNDN

SEQ ID NO: 1223 - protein, 378 aa, Lactobacillus acidipiscis
MSVIKNFPAHAKPYQATYTNGSGRGRIRKIKSFVSSKDAQLWLKQMETNFINGETYAKSQMLFVDYFQEWYRLYKAPVVSPPTLDSYYNSWRHFKEHGLGHVKMENLTRDKIQTYLNDLAYAKETTRKDLNHLRACLRDAYDDGVISRNPAAGTLHVIADPAKSKSKDRKFMAETDFRKVQDFLLNYNYRLSDVNRAVLLVISQTALRVGEALALRYDDLNQLNCTIRVDESWDAKHLMFGKPKTESGYRTIPVSRQAMKKIITWQNFHRRELFRRGIPNPGNLLFLNRQKNLPRASAINSCYHQLQLRLGIEAKFSTHTMRHTLASILLGSGEVSIQYISYFLGHANVAITQKYYIGLLPEQVEKEDQEVVKIVGAL

SEQ ID NO: 1224 - protein, 350 aa, Veillonella montpellierensis
MASYSISTRQKDKNWQVIVSYKDRYGRWRQKSKQGFLTKRTAKDYGDIIVKEIKENLLLTNNEELANITFLEFSKIYFNDVKDTLRANSLITYQNLIKYVSPLYNLQLHEITPLIINTTLKNITSSTTSKKFIVSILKRIFSHAIKEYNLLSKNPVTATVPSEKINKPIRVITNEELDLYYNTISTSNQIYVAIKILQYTGIRIGELFALTQDDIDYKEMTISINKQFVTVGKNKNGIGPLKTKNSYRTIPIPKSLAVILSEYTSTCTTDRIITYKSTNALRKHIKKHINNHAPHDFRHTYATKLLANGMDVKTVAALLGDTVTTVINTYIHYSDEMRQSAKKDIQRIFD

SEQ ID NO: 1225 - protein, 308 aa, Veillonella montpellierensis
MKLIEKMKGATKRPYVAYKIVGYYRTYDEAVDALQNASKKYTLYQLYTSWLSTHRNSVTSTTISNYHSAIAHATSIHNTYIDEITYIQLQSIIDTMLRNHLSYSSCKKVRSLLSQLFDYAIINNLISTNYAHYVKIGTNTPVRPHVTFTTRQINKLWRLSSPLRDIPLILLYTGMRATELINLTSKNVNRKQRTIRITSAKTKAGIRTIPIHDRIYDIIINRLDSQYVIEECRTYQSLAHQFNQAMKAINAKHTTHDCRHTFATRLDDVGANYNAKRLLLGHASSNVTDGVYTHKSLVQLRKAIRMLK

SEQ ID NO: 1226 - protein, 352 aa, Scytonema hofmannii
MRSKKGEVSISLRNGNYQLYWRYKGEKFYLSPGLSESKVNAIAVEKLANQIKLDIIFENFDETLKKYKPEKTVEKVNKAKKELDIDSRLENYFTVRGIKSKGTKDVYLAVVKRYKSFFYGKKEPNLTDLQKFLEHLKNEGLSLVTIKSYLIKLAAVFDNTEPWKIIKKQIKPNPVQPKPFTKEEVFSIIENCPEHYRNFVKFLFYSGCRIGEAINLKWENVTEDFSSVWILADKTKKARKLILTEELKAVIRDSKDKAKSNIYVFTAKTRKSEQVSRKYFCDYIWKPLLIKLNISYRKPYYTRATMISHSLEAGLSPLKLAKITGHSQSTMWNHYYADLGIENKIPDIFNQE

SEQ ID NO: 1227 - protein, 470 aa, Scytonema hofmannii
MHIVTFKGRIRFNLPRQWFGGKQQQWNLKLEATEVNMALASRVARRLEMDFQDGKLTVALPDGSTAFNKEHYNKVLAEYNIEGNLRTDLKLITGGLPSDEIPPKPQMSLLDVWDMYCEHKFKNGKLAKTTYGQYKSQYRNYLISAMEANGGEDAIKIKNWLLENRNREIVCKILSGLEQAYKVALRQKLVSFNPYEGIMEDVSRIKRETEIDVTKESDEDLLNKSKAYTWDEAQVIMEYLKDSPSYGHWYHFVAFKFLTGCRTGEAIGLCWMDVKWDGQCVVISKTWTRLKFYKPTKTEKEKRVFPMPVDGELWNLLKSLPQGNPSEPVFKSKNEKMIHIDIFGTAWRGRESKRNKGIIPTLIEQGKLSKYLPPYNTRHTFVTHQIFDLGRDEKIVSAWCGHSEAVSSKHYQDIADRASQINPELPVNNQQVQQVSNEMDEMRNIIKSLQEQLKTQSEVIASLQEQLKNK

SEQ ID NO: 1228 - protein, 397 aa, Scytonema hofmannii
MYETGKPSSRVPKITPRNNNGGIIIRFQYQGKQYSISPGGKYSDKLAIANANKIASQIKTDILAGYFDPTLEKYQPKVKQPDNVVSINKDVALSLKELWEQYKLAKRASVAETTQKEKWSQIDRCLTKVSPEILNPENARLLIPELLKAYSSTTLERIINDIHACSHWAFETGLISINPWRRLKQQLPDKPQSSRTKKAYSRDEVNAIIQAFRGDWYCNSKSAFKDSWYADFIEFLFLTGCRPEDAIALTWEQVKERVIVFDKAYSCGVLKSTKNNKARMFPITPQIRELLDRRLTSVSTIPTKLVFPAQNGNYINLRNFTQRYTKRIIENLVSEGKVKQYLPTYNLRNTSITHYLRQGVDIATVAALMETSEEMINQHYWSPDDDIINNNVQLPEI

SEQ ID NO: 1229 - protein, 363 aa, Candidatus Aquarickettsia rohweri
MNNFININNDKNSIIVANLQEKVKDYARHAFAKNTIKNYQSDWKIFCTWCESLNINPLNITHNTLIAYITFLAEENYKASTIQRKISAIYKYCETKNIHINLQDKEFKIVWQGIRRKIGIVKQGKDPILLKDLEDILQHISKNTHMGIRDRALLTFGWFSAMRRSELVKLNWQDISFIKEGIIINIRQSKTDKFGEGQKIAILKRKIFCPIKHLKAWQKINNNEAVFCSVNKADKVTGIRLSCIDVARITKKHSAKIDFDTSKIAGHSLRRGFVTTAVSSGIRNHIIMKTTRHKSSKMIDDYTHDNSLLENNATNMIITSNSSSKKFNSILKNYLQFKAAYKLYNKVKTNIKKLYFFCIPPTL

SEQ ID NO: 1230 - protein, 469 aa, Plasmodium fragile
MHHIGKALCFFFILNCMDKTTSFFINKVHIFHLTTFRNGGNLTHIRKKCPNSMGVTVKRKGACLNSHDEEEAEDIDEAETEDEEEMQEEDELEETSDVDETDASDGRLSPRSTKKVTTGGKRVKAGKIKKRKRKKKTTNAAKCRTCNKILKPRVKFCVHCGTNVSVEKIKLKKYIEDIYLPLRKEEVSYNTYRVEKGFWNDILPKLGKYELHELGPNNWESFLKYLKWKNCSPRTMALYQSTYQQSLKYALYRDYLKSVHNFRKIKNSTIPRRKITPLSPKEIELLLINSGDMHRAIFALSIGIGLRPSEVLRILWEDVNFEKKEIFIKGQKTKYSNTAIPMTNFAYNELVKWWEIEKKPLKGLCFYSETIKNKFNYTNTKTPLKTFKTALKGAAKRAGLEISEDGKKRRIFPYLLRHSFATIAATSNPPVPLPVAQAIMRHSSSKMLLDTYTKAGNNIIRDGLDNFKI

SEQ ID NO: 1231 - protein, 411 aa, Cycloclasticus sp. DSM 27168
MAIHKPVALYPTFKELKEIPLDEFPELSSFLSSGPGWRKQSWLWGQEFLSYIGRNKSQHTYTRFRSEIEKFLLWSFVIKESPCDEFRKTDILDYADFCWKPPQTWISLTNHDKFQPKGDGTYIQNKAWSPYRLVVSKGDNSTPDKKKYRPSQQTLRATFTAIIAFYKYLMDEEYCVGNPAQLAKKDCRHFIKDAQVKDVKRLSEEQWLFLLETVTAMADDNSRFERNLFLIAALKTLFLRISEFSERPDWIPVMGHFWEDTDKNWWLKVYGKGRKLRDITVPSSFMPYLKRYRLYRGMSSLPLDGEKHPIVEKLRGSGGMTARQLSRLVQEVFDHAYETMKKQQGEEIARKFREVSTHWLRHTGASLEIERGRALKDLSEDLGHSSMATTDTVYVQSEDRKRAESGKNREV

SEQ ID NO: 1232 - protein, 413 aa, Paraglaciecola psychrophila
MLLKKPVPLYPPYLDLCDFDFKDYPELKEIFSSNESWWLEQFNWGKVFLNYIGRNKSTHTYDRFRNDVERFLLWSFIEKKKPIDQLRKTDLLEFADFCWHPPVSWIGTSNQERFKIMNGYSCANEFWFPYKIQAPKSQKTQFIIDKKKYRPSQQTLSSMFTAIIVFYNYLMAEDFCIGNPAQIAKKDCRHFIIDSQVKEIKRLTGSQWQYVLDTAVEMADDNPVFERNLFVIVALKTLFLRISELSERTNWSPTMGHFWQDDDENWWLKIFGKSRKIRDITVPIDFLPFLERYRISRGLIGLPSSNENLVLVEKIRGQGGMTSRHLRRLVQSVLDQAHENMRTSEGENKALKLKEASAHWLRHTGASMEIERGRPLKDISEDLGHASMATTDTVYVQSENKKRAESGKQRKVD

SEQ ID NO: 1233 - protein, 345 aa, Unknown
  source: /note="Description of Unknown: Type-F symbiont of Plautia stali sequence"
MTELVPLTELQMNRSGDIAERLRQFVQDKEAFSPNTWRQLLSVMRICNQWSEENQRSFLPMSADDLRDYLTFLAESGRASSTVTSHAALISMLHRNAGLPVPNTSPQVFRAMKKINRVAVMSGERAGQAVPFRLSDLLALDRQWSGADSLQARRDLAFLHVAYATLLRISELSRLRVRDVMRAGDGRIILDVAWTKTVVQTGGLIKALSTRSTQRLEEWLDASGLSGQPDAYLFTAVHRSGRSLPAEKPMSTRALEQIFERAWRCAGKAGGVKANKNRYTGWSGHSARVGAAQDMADKGYPIARIMQEGTWKKPETLMRYIRHVEAHKGAMVEFMEQHADGTLPD

SEQ ID NO: 1234 - protein, 346 aa, Pantoea sp. OV426
MSELVPITSLEASRNSDDITERLRQFVQDKEAFSPNTWRQLLSVMRICNRWSEDNQRSFLPMSAEDLRDYLSFLAESGRASSTITSHAALLSMLHRNAGLPVPNVSPLVFRTMKKINRVAVMNGERAGQAVPFRLTDLLALDGEWSGSESLQALRDLAFLHVAYATLLRISELSRLRVRDVMRAGDGRIILDVAWTKTIVQTGGLIKALSARSTQRLEKWIEASGLFSQPDAYLFSAVHRSGRALIAEKPISTRALEQIFSRAWLTAGKSGAVKANKNRYTGWSGHSARVGAAQDMADKGYPIARIMQEGTWKKPETLMRYIRHVDAHKGAMVEFMEQHADTDFPG

SEQ ID NO: 1235 - protein, 403 aa, Pseudoalteromonas citrea
MLSPLVDTLKQLRYQIAHIEDGTLTNEYPELESFLSHVVRSVPNARDDIEFLYQFLYVYGRKSEATFNRFRNELERFYLWAWEWRALSVFELKREDIEAYVEFVVEPDNRWISDSVQWRFKDHEGLRVVNKLWRPFAFKENGVSQQTFSAMFTALNVFYKFAILEEKTFTNFIPVVKKNSPYLIVQSQIKLPDTLSNLQWEYVFGVTRDKCEENPSLERNLFTLACLKGLYLRISELSERPQWSPVMSHFWQDPDGFWYLRIMGKGNKLRDVTLSEDFIIYLRRYRQYRALPALPRVDEPHPIIHKLRGQGGMNVRQIRRIVQQSFDLAVDSLAADGFSDESEQLKAATAHWLRHTGATHDAQHRPLKHLSEDLGHAKIATTDQIYIQTNIKDRAKSGSKRKL

SEQ ID NO: 1236 - protein, 437 aa, Pseudomonas plecoglossicida
MARTVTPLSDSKCEAAKPRDKDYKLFDGQGLFLLIKPSGVKTWRFKFIRPDGREGLATFGNYPALGLKAARDRRADFLELLAAGRDPIEAGKVAKMDAANARINTFEALARVWHSTCARKWKPHHAATVLRRMELHLFPSLGARPIADLKARDLLAPLKAAERRDTLETASRLRQYIAGILRMAVQHGIIDINPANDLQGATATRKTAHRPALPLERLPELLTRMDAYNGRQLTRMAVQLSLLVFTRSSELRFARWDEIDFERALWTIPAERQPIEGVKHSTRGAKMATPHLVPLSRQALALLAEVHQLTGNYELVFAGDHHYWKPMSENTVNAALRRMGYDTKADVCGHGFRAMACSSLVESGLWSRDAVERQMSHQERNGVRAAYIHKAEHIEERRLMCQWWADYLDASRKKYATPYDFANCGRDAGNVVSIMRG

SEQ ID NO: 1237 - protein, 402 aa, Croceicoccus naphthovorans
MAPETALDDDRPDRGEALSLSRDLALVAHGPGAGPSPELLAAYVRAAAPNTLRAFRSDVLAFDAWCRSRGEKSIPASPQIVADWLSTRASGGAAPASLSRYKASIARLHRLCGLADPTGDELVRLTLAAYRREKGVAQKQARALRFRGAVKDPLSDTPRGINVRAVLASLGDGLTDLRDKALLSLAYDTGLRASELVAVQVEDIGEAIDADARLLAIPRSKGDQEGEGATAYLSPRTVRALEAWLKAAVIGEGPVFRRVVVRRYAARQARKARNGKERGWNARWVPERFAAKDAEPVRIESDVGEGALHPGSITPLIRSMLRRAFDVGAFGDLDAATFEKQVREISAHSTRVGVNQDYFAAGEDLAGIMDALRWKSPRMPLQYNRNLAAEQGAAGRLLGKLR

SEQ ID NO: 1238 - protein, 355 aa, Sphingomonas sp.
MNALLPFADDVTGSGIVAIDADVIDAARRAMSPNSWRALRADIRVFAGWCAARGLMTLPALPATVATFLADQADHGKKAATLARYTASIARLHALADQPDPTRTERVRLELKAQRRALGVRQRQARGLRFRGEVADPLAAAGPVGVCVEAMLAATGDDLPGQRNRALLSLAFDTGLRRSEIVAIRWPHVERGGAGGGRLFVPRSKADQEGAGAYAYLSARTMTALGEWRAACGGRSDGALFRRLHRTRDKSGADIWSVGAALSAQSVTLIYRAMLDAAHAAGLLGMIDSADFDIWRASLTAHSTRVGLTQDLFASGQDLAGIMQALRWKSPAQPARYAQALAVESNAAAKVVGKL

SEQ ID NO: 1239 - protein, 201 aa, Lactobacillus oris
MKQLVLPIKDSNVLHEVQDTLLNNFRFGRRNYTIFQFGKATLLRVSDVLALRRNEIFTDDGLIKKNAYIRDKKTNKPNILYLKPIKQDLSQYYSWLDENSIHSEWLFPSLKHPERHISEKQFYKEKQFYKIMAKTGDLLNINYLGTHTMRKTGAYRVYTQTNFNIGLVMSLLNHSSEAMTLKYLGLDQVSREQMLDEVKFD

SEQ ID NO: 1240 - protein, 403 aa, Bilophila wadsworthia
MPLTDTHIRSLKPDVKPRKYFDGGGLFLFVPANGSKLWRMAYRFDGKSKLLSFGEYPTISLKDARERREEAKRMLSKGIDPSDHKRQLRQARAIAERDSFQNIAREWHETRMAEFSEKHQGTVMYRLETYIFPAIGKTHIAKLETRDVMEVVKPLEQRGNYETSRRVLQIISQVFRYAVITGRAKHNVAADLRGALRPRKTVHRAAVLEPEKVGQLLRDIDAYEGYFPLVCALKLAPLVFTRPTELRAAQWKEFDLEAGEWRIPAERMKMRRQHLVPLSRQAMSILRELQKCSGEGKYLFPSIRTEARSISDATMLNALRRMGYQKHEMSVHGFRSIASTLLNELGYNRDWIERQLAHGEQDEVRAAYNYAEYLPERRKMMQAWADYLDGLRNTQQKRIREEA

SEQ ID NO: 1241 - protein, 326 aa, Sporomusa sp.
MNSNDKDFVLRKNNFIQNNKKLSIKSKKRLQKSKSDNTLRAYEADWMDFYDWCTYHSLQALPAEPETIVNYINDLADHAKANTVSRRVSAISENHKAAGCVDNNPCRGGLVRNALDAIRREKGTLQRGKAPILMEDLRNITAYFDTTDIAGIRDKALLLVGFMGAFRRSELVQIDIEDLTFTQEGVIILVAQSKGDQLGQGAQVAIPYSSNLDICAVTALKSWIHRANLASGPLFRPVNKYKQIRNRRLTNQSVAIIVKKYTKLSGLNPDNFAGHSLRRGFATSAAQHDVDERSIMQQTRHKSEKMVRRYIEQGNLFKNNPLNKMF

SEQ ID NO: 1242 - protein, 201 aa, Synechococcus sp. PCC 7502
MAKNNRHGQAEILKDLELDRIYRQLQSDSHRLFFNIARYTGERFGAICQLQVCDVYVCYSGIKEPLNEITFRAMTRKASPNGERKTRQAYVCDRLREYLSSYRGELGKVYLFPSSIKKDDPITFSAADKWLRTAVDRAGLEHRGISTHTFRRSFITKLYEEGALDIYAIQQLIGHASILTTQRYLGVSKQKIQSAMNRIYN

SEQ ID NO: 1243 - protein, 345 aa, Pantoea agglomerans
MSELVPLTPLTVDRNSDITERLRQFVQDKEAFSPNTWRQLLSVMRICNRWSEDNQRSFLPMSADDLRDYLSFLAESGRASSTVTSHAALISMLHRNAGLPVPNVSPLVFRTMKKINRVAVINGERAGQAVPFRLSDLLALDEEWSGSDNLQALRDLAFLHVAYATLLRISELSRLRVRDVMRAGDGRIILDVAWTKTIVQTGGLIKALSARSTQRLEEWIEASGLSSQPDAWLFTAVHRSGRPLIAEKPMSTRALEQIFSRAWRTAGKEGAVKANKNRYTGWSGHSARVGAAQDMADKGYPIARIMQEGTWKKPETLMRYIRHVDAHKGAMVEFMEQYGDPDYPG

SEQ ID NO: 1244 - protein, 345 aa, Pantoea sp.
MSELVPLTPLTVDRNSDITERLRQFVQDKEAFSPNTWRQLLSVMRICNRWSEDNQRSFLPMSADDLRDYLSFLAESGRASSTVTSHAALISMLHRNAELPVPNVSPLVFRTMKKINRVAVINGERAGQAVPFRLSDLLALDKEWSGSDNLQALRDLAFLHVAYATLLRISELSRLRVRDVMRAGDGRIILDVAWTKTIVQTGGLIKALSARSTQRLEEWIEASGLSSQPDAWLFTAVHRSGRPLIAEKPMSTRALEQIFSRAWRTAGKEGAVKANKNRYTGWSGHSARVGAAQDMADKGYPIARIMQEGTWKKPETLMRYIRHVDAHKGAMVEFMEQYGDPDYPG

SEQ ID NO: 1245 - protein, 345 aa, Pantoea anthophila
MTELVPLTELQMNRSGDIAERLRQFVQDKEAFSPNTWRQLLSVMRICNQWSEENQRSFLPMSADDLRDYLTFLAESGRASSTVTSHAALISMLHRNAGLPVPNTSPQVFRAMKKINRVAVMSGERAGQAVPFRLTDLLALDRQWSGADSLQARRDLAFLHVAYATLLRISELSRLRVRDVMRAGDGRIILDVAWTKTVVQTGGLIKALSTRSTQRLEEWLDASGLSGQPDAYLFTAVHRSGRSLPAEKPMSTRALEQIFERAWRCAGKAGGVKANKNRYTGWSGHSARVGAAQDMADKGYPIARIMQEGTWKKPETLMRYIRHVEAHKGAMVEFMEQHADDALPD

SEQ ID NO: 1246 - protein, 345 aa, Pantoea agglomerans
MSELVPLTPLTVDRNSDITERLRQFVQDKEAFSPNTWRQLLSVMRICNCWSEDNQRSFLPMSADDLRDYLSFLAQSGRASSTVTSHAALISMLHRNAGLPVPNVSPLVFRTMKKINRVAVINGERAGQAVPFRLTDLLALDKEWAGSDNLQALRDLAFLHVAYATLLRISELSRLRVRDVMRAGDGRIILDVAWTKTIVQTGGLIKALSTRSTQRLEEWIEASGISSQPDAWLFTAVHRSGRPQIAEKPMSTRSLEQIFSRAWRTAGKEGAVKANKNRYTGWSGHSARVGAAQDMADKGYPIARIMQEGTWKKPETLMRYIRHVDAHKGAMVEFMEQYSDPDYPG

SEQ ID NO: 1247 - protein, 345 aa, Pantoea sp.
MSELVPLTPLTVDRNSDITERLRQFVQDKEAFSPNTWRQLLSVMRICNRWSEDNQRSFLPMSADDLRDYLSFLAESGRASSTVTSHAALISMLHRNAGLPVPNVSPLVFRTMKKINRVAVINGERAGQAVPFRLSDLLALDKEWSGSDNLQALRDLAFLHVAYATLLRISELSRLRVRDVMRAGDGRIILDVAWTKTIVQTGGLIKALSARSTQRLEEWIEASGLSSQPDAWLFTAVHRSGRPLIAEKPMSTRALEQIFSRAWRTAGKEGAVKANKNRYTGWSGHSARVGAAQDMADKGYPIARIMQEGTWKKPETLMRYIRHVDAHKGAMVEFMEQYGDPDYPG

SEQ ID NO: 1248 - protein, 345 aa, Pantoea agglomerans
MSELVPLTPLTVDRNSDITERLRQFVQDKEAFSPNTWRQLLSVMRICNRWSEDNQRSFLPMSADDLRDYLSFLAESGRASSTVTSHAALISMLHRNAGLPVPNVSPLVFRTMKKINRVAVINGERAGQAVPFRLTDLLALDKEWAGSDNLQALRDLAFLHVAYATLLRISELSRLRVRDVMRAGDGRIILDVAWTKTIVQTGGLIKALSTRSTQRLEEWIEASGISSQPDAWLFTAVHRSGRPLIAEKPMSTRSLEQIFSRAWRTAGKEGAVKANKNRYTGWSGHSARVGAAQDMADKGYPIARIMQEGTWKKPETLMRYIRHVDAHKGAMVEFMEQYSDPDYPG

SEQ ID NO: 1249 - protein, 345 aa, Pantoea allii
MSELVPLTPQTVDRNSDITERLRQFVQDKEAFSPNTWRQLLSVMRICNRWSEDNQRSFLPMSADDLRDYLSFLAESGRASSTVTSHAALISMLHRNAGLPVPNVSPLVFRTMKKINRVAVINGERAGQAVPFRLTDLLALDKEWAGSDNLQALRDLAFLHVAYATLLRISELSRLRVRDVMRAGDGRIILDVAWTKTIVQTGGLIKALSTRSTQRLEEWIEASGISSQPDVWLFTAVHRSGRPLIAEKPMSTRSLEQIFSRAWRTAGKEGAVKANKNRYTGWSGHSARVGAAQDMADKGYPIARIMQEGTWKKPETLMRYIRHVDAHKGAMVEFMEQYSDPDYPG

SEQ ID NO: 1250 - protein, 345 aa, Pantoea sp.
MSELVPLTPLTVDRNSDITERLRQFVQDKEAFSPNTWRQLLSVMRICNRWSEDNQRSFLPMSADDLRDYLSFLAESGRASSTVTSHAALISMLHRNAGLPVPNVSPLVFRTMKKINRVAVINGERAGQAVPFRLSDLLALDEEWSGSDNLQALRDLAFLHVAYATLLRISELSRLRVRDVMRAGDGRIILDVAWTKTIVQTGGLIKALSARSTQRLEEWIEASGLSSQPDAWLFTAVHRSGRPLIAEKPMSTRALEQIFSRAWRTAGKEGAVKANKNRYTGWSGHSARVGAAQDMADKGYPIARIMQEGTWKKPETLMRYIRHVDAHKGAMVEFMEQYGDPDYPD

SEQ ID NO: 1251 - protein, 348 aa, Pantoea deleyi
MRESASLINLTVNRSDDIAERLRQFVQDKEAFSPNTWRQLISVMRICHQWSEVNQRTFLPMRAEDLRDYLAFLAESGRASSTVTSHAALISMLHRNAGLDVPNASPLVFRTMKKINRVAVINGERAGQAVPFRLRDLLMVDRHWSGSENLQSLRDLAFLHVAYATLLRISELSRLRVRDVMRAGDGRIILDVAWTKTIVQTGGLIKALSRHSTQRLEEWITVSGLASHPDAYLFSAVHRSGRAQITDKPMTTRALEQIFSRAWAIAGKSGAVKANKNRYTGWSGHSARVGAAQDMADKGYSIARIMQEGTWKKPETLMRYIRHVDAHKGAMVEFMEQIADGDHSGQSS

SEQ ID NO: 1252 - protein, 345 aa, Pantoea agglomerans
MSELVPLTPLMVDRNSDITERLRQFVQDKEAFSPNTWRQLLSVMRICNRWSEDNQRSFLPMSADDLRDYLSFLAESGRASSTVTSHAALISMLHRNAGLPVPNVSPLVFRTMKKINRVAVINGERAGQAVPFRLTDLLALDKEWAGSENLQSLRDLAFLHVAYATLLRISELSRLRVRDVMRAGDGRIILDVAWTKTIVQTGGLIKALSTRSTQRLEEWIEASGISSQPDAWLFTAVHRSGRPLIAEKPMSTRSLEQIFSRAWRTAGKEGAVKANKNRYTGWSGHSARVGAAQDMADKGYPIARIMQEGTWKKPETLMRYIRHVDAHKGAMVEFMEQYSDPDYPG

SEQ ID NO: 1253 - protein, 345 aa, Pantoea sp. ARC607
MRKSAPLTNLTVTRNSDIAERLRQFVQDKEAFSPNTWRQLISVMRICHQWSEDNQRTFLPMSAEDLRDYLAFLAESGRASSTVTSHAALISMLHRNAGLAVPNASPLVFRAMKKINRVAVINGERAGQAVPFRLGDLLLLDQRWSGSDNPQWLRDLAFLHVAYATLLRISELSRLRVRDVMRAADGRIILDVAWTKTVVQTGGLIKALSSRSTQRLEEWMEVSGLAAHPDAYLFCAVHRSGRAQIMEKPMSTRALEQIFSRAWDIAGKCGAIKANKNRYTGWSGHSARVGAAQDMADKGYPIARIMQEGTWKKPETLMRYIRHVDAHKGAMVEFMEQIADSDVPG

SEQ ID NO: 1254 - protein, 358 aa, Mesorhizobium alhagi
MQDARKTDDTADDDLPDIVDLVVEMGHVAGSPARVDTLVEAATGFAKPARSENTQAAYAKDWRHFTGWCRREGFDPLPPSSQVIGLYIGACAAGDPKHGAPALSVATIERRLSGLAWNFAHRGQPMDRVDGHIATVLAGVRKKHAKAPRQKEPLLGDDLLAMIAMLGQDLRGMRDRAILLLGFAGSLRRSEIVGLDVVRNENGDGAGWVEIYPDKGALVTLRDRTGWREVEVGRGSSDQSCPVVALETWIKFGRIARGPLFRRISKDNKTVYVERLSDKHVARLVKKTALAAGIRADLAEGEREQLFAGHSLRAGLASSAEIEVRVQEQWGHASAGMTQKYQRRRDRFRVNRTKASGL

SEQ ID NO: 1255 - protein, 253 aa, Clostridium beijerinckii
METVNGVLKYAQKSKLIYNLPTDIEKQPMNKPKVEFWAKEEIDFYLDKIHDSYLYTPILIEIFTGLRVGELCGLRWCDIDFEDRYLTVNNQVIYDRELKMLVFSKILKTDTSHRKITMPKILTDYLKSIKSDALDTDFVVLDREGSMCNPRNLSMNFTKSIHKYKKSIDDLKIEDRSIPENYMQLKQITFHALRHTHATLLIFNGENIKVISERLGHKNISTTLDTYTHVMEDMKNSTADLLDNIFRYIPSTT

SEQ ID NO: 1256 - protein, 310 aa, Pseudomonas marginalis
MSDLDRYLNAATRDNTRRSYRAAIEHFEVSWGGFLPATSDSVARYLVAHAGVLAVNTLKLRLSALAQWHTSQGFPDPTKAPVVRKVLKGIRAVHPAREKQAEPLQLKHLEQVVGFLQEDANAAREAYDQPRLLRAKRDTALILLGFWRGFRSDELCRLAIEHVQATPGAGISLYLPRSKSDRENIGKTYQTPALLRLCPVQAYSEWLSASALVRGPVFRAVDRWGNLGEEGLHPNSVIPLLRQALERAGIPADQYTSHSLRRGFASWAHRSGWDLKSLMSYVGWSDIKSAMRYVEAAPFLGMTLATPALV

SEQ ID NO: 1257 - protein, 310 aa, Pseudomonas sp. ICMP 460
MSDLDRYLNAATRDNTRRSYRAAIEHFEVSWGGFLPATSDSVARYLVAHAGVLAVNTLKLRLSALAQWHTSQGFPDPTKAPVVRKVLKGIRAVHPAREKQAEPLQLKHLEQVVGFLQEDANAAREADDQPRLLRAKRDTALILLGFWRGFRSDELCRLAIEHVQATPGAGISLYLPRSKSDRENLGKTYQTPALLRLCPVQAYSEWLSASALVRGPVFRAVDRWGNLGEEGLHPNSVIPLLRQALERAGIPADQYTSHSLRRGFASWAHRSGWDLKSLMSYVGWSDIKSAMRYVEAAPFLGMTLATPALI

SEQ ID NO: 1258 - protein, 376 aa, Lactococcus raffinolactis
MASARYRQRGKKKLWLVEIRQGDKTLDSKSGFRTKKDAQKYAEPILQKIRNGNTLRPDMTLVDLYQEWLDLKIIPSSRQQTTINKFILRKKIIKKYFGNKKVSEIKPSDYQKAMNEYGNHINRNGLGRLNNDIHNAISMAIADKVLIDDFTINVELYSTKVAQAVDDKYLQSEADYNAVIEFITQKLDYHKSVVPYVIYFLFRTGMTYAELIAVTWKDIDFTKSVLKTYRRYNTGTHKFVPPKNKTSIRTVPIDAKSLIILKSLQSQQKKANQELGVDNNENFIFQHHSLRYDIPLIETVSKAIKEMLKTLKITPLLSTKGARHTYGSVLLHRGIDMGVIAKLLGHKDISMLIEVYGHTLQERVEEEYQEVRNVLK

SEQ ID NO: 1259 - protein, 330 aa, Sphingomonas sp. PP-CC-3A-396
MSDDLDDTALTRISSTPLIPLLLDEEIEAARAYVAAARAPATRRAYESDWRIFLAWCAAHAIDPLPAAPGAVAIFLSGEAQEGARPSTIGRRLAAIGYMHAQAGLDPPQQQAGAIAIRNVVAGIRRTHGVKKVQKRAADGDMLRDMLRACDGDSIRDVRDRALLAIGMAAALRRSELVALNIDDVAITPDGLLITIRKSKTDQEGEGATIAVPEGRRIRPKALLLAWIACAGFGDGPVFRKLTPQGRITAKPMSDRGVALVVKARASGAGYDSAHVAGHSLRAGFLTEAARQGATVFKMKEVSRHKSLEILSDYVRNHELFRDHAGERFL

SEQ ID NO: 1260 - protein, 321 aa, Vogesella indigofera
MEKIAHYLAAATRDNTRRSYAAAIRHFEVEWGGFLPATADSMARYLADHAETLSVSTLKQRLAALAQWHQQQGFPDPTKAPVVRQVLKGIRALHPAQQKQALPLQIRQLEQLLAWLDGAIELAIQQQDHAARLRCRRDKALLLLGFWRGFRGDELLRLQIENIALVAGEGMNCYLAQSKGDRQLQGRVFRVPQLSRLCPVSAYGEWLADSGLREGAVFRGISRWGVIGEDGLHINSLIPLLRRLFAAAGLAEAARFSGHSFRRGFANWASANGWDLKTLMAYVGWKDIQSAMRYIDAADPFARQRIENSLPPAPALPPVAD

SEQ ID NO: 1261 - protein, 409 aa, Sporomusa sphaeroides
MAKRANGEGTICKRKDGLWTGAVTIGRDAETGKLIRKYFYGKSKTEVQEKKAAQLEKTKGLAYLDADKLSVSQWLNKWLTLYARTTVRQNTLEGYQFIVDNHVIPALGAVKLGKLQSNQIQGMVNAILDKGGSPRLAEFSFAVLRRSLRQALKEELIYRDPTLAVSLPKKQKKEIVPLTDEEWTALLATAAKPVFRSLYAALLLEWGTGIRRSELLGLRWPDIDFARGAVSICHAAISTKDGPQLAEPKSKKSRRTLPVPPTVLAELKKHKSRQAARQLKAKTWENNNLVFPTRSGGLQDPRVFSRRFARLVKAAGITSGLTFHGLRHDHATRLFAQGEHPRDVQDRLGHASITLTMDTYTHSMPSRQQAIASRLEANLPGRKPQADTAAAETAATAPTAAAVQQPVLQ

SEQ ID NO: 1262 - protein, 310 aa, Pseudomonas syringae
MVSKADRYLEASVRQNTSKSYAAALSHFEVTWGGFLPTTTESVVRYIAEYADQLALSTLKQRLAALANWHQSNGFPDPTKAPKVRQLLKGIRAVHPVQQKQAAPLALLHLEKAVAHLEDEVVQAKAAGNMGALLKATRDIALLTIGFWRGFRGDELARLTIENTHAERYVGIRFYLGSSKGDRHNTGREYKTPSLSKLCPVEAYLNWIEAAGLTRGGIFRGIDRWGNISDRPLAAHSLVPLLRDTLNRCGLPSEIYSAHSIRRGFATWAASSGWDIKTLMEYVGWSDMKSALRYVEPAQQFGGLIRKLEG

SEQ ID NO: 1263 - protein, 348 aa, Xenorhabdus bovienii
MPIYKRSNKYWIDVSAPNGERIRRSTGTEDKLKAQEYHDKVKHELWQLERLDKQPERYFEEMIIMALRDAEPQSCFANKQIYARYFLSIFKGRKISSITSEEITNSLPTHSNETKSKLSNATQNRYRAFIMRSFSLAYKMGWITKPHHVTRLREAKVRVRWLERHQAVELINNLSLDWMKKLVSFALLTGARKGEIFSLIWRNVNLDRRIAVITAENAKSGKARAVPLNDEVVSILRNLPRECEFVFSSNAKRIKQISRTDFDRALKKSGIDDFRFHDLRHTWASWHAQSGTPLMALKEMGGWETLEMVNKYAHLSGEHLAKYSGVVTFLTQTDKCSSQKQHLKLLTG

SEQ ID NO: 1264 - protein, 481 aa, Komagataeibacter sp.
MLSDVRILGTSRQAQAALHARVDPLTQQRLAETQDPARWREILSTARFTPPLPLLLAGIELPDGSYSPDTPLAQDVPYASAAQQMAQDHVADIPSGFELAIGLEIDDGTPCFLAWFRPLQPVGSCSGTVDAAPPAPVGQPAAAVAQWFSVVSAQPVPEHDGRLATARQAADAYMHRSKAENTLRTYRAAVRSWCRWAAGHALPALPARSEDVAAYLADMALQGRRTSTIDLHRAALRYLHHLAQTAVPTAHPMVTATLAGIRREAKETLPRQKTALTWDRLVRVVEAISPHDLVGARDRAILLLGFAGAFRRSELAALKVEDITVDEDGMQIRLGRSKGDPQRKGALIGIPRGLTRNCPVRAYETWLRQAGITEGPVFRRIWSARDRRAGATPVGTPPRIGPHALSDRAVTDIIRKRCGDTHLEGDFGGHSLRRGAITTGAKDGYDLLELKRFSRHKSLQVVETYIDEASIKARHPGRSRF

SEQ ID NO: 1265 - protein, 482 aa, Komagataeibacter saccharivorans
MLSDVRILGASKRAQAALHDRVDPLTRQRLAETQDPARWREILSTARFTPPLPLLLAGIELPDGTYSPDTPLAQNVPYASAAQQMAQDHVADIPSGFELAVGLEIDDGTPCFLAWFRPLQPVEPCPGMADAAPPPAPVGQPAAAVAQWFSVVSAQPVPEHDGRLATARQAADAYMHRSKAENTLRTYRAAVRSWCRWAAGHALPALPARSEDVAAYLADMALQGRRTSTIDLHRAALRYLHHLAQIAVPTAHPMVTATLAGIRREAKETLPRQKTALTWDRLVRVVEAISPHDLVGARDRAILLLGFAGAFRRSELAALKVDDITVDEDGMQIRLGRSKGDPQRKGTLIGIPRGLTRNCPVLAYETWLRQAGITEGPVFRRIWSARGHRAGATPVGTSPRIGPHALSDRAVTDIIRKRCGDTHLEGDFGGHSLRRGAITTGAKDGYDLLELKRFSRHKSLQVVETYIDEASIKARHPGRSRF

SEQ ID NO: 1266 - protein, 481 aa, Unknown
  source: /note="Description of Unknown: Acetobacteraceae sequence"
MLSDVRILGSSRRAQAALHARVDPLTRQRLAETQDPARWREILSTACFTPPLPLLLAGIELPDGSYSPDTPLAQGVPYASAAQQMAQDHVADIPSGFELAVGLEIDDGVPSFLAWFRPLQSVGSRSETADAAPPAPVGQPAAAVAQWFSVVSAQPLPEHDGRLATARQAADAYMHRSKAENTLRTYRAAVRSWCRWAAGHALPALPARSEDVAAYLADMALQGRRTSTIDLHRAALRYLHHLAQIAVPTAHPMVTATLAGIRREAKETLPRQKTALTWDRLVRVVEAISSHDLVGARDRAILLLGFAGAFRRSELAALKVDDITVDEDGMQIRLGRSKGDPQRKGTLIGIPRGLTRNCPVLAYETWLRQAGITEGPVFRRIWSARDRRAGATPVGAPPRIGPHALSDRAVTDIIRRRCGDTHLEGDFGGHSLRRGAITTGAKDGYDLLELKRFSRHKSLQVVETYIDAACIKARHPGRSRF

SEQ ID NO: 1267 - protein, 481 aa, Komagataeibacter medellinensis
MLSDVRILGTSRRAQAALHARVDPLTQQRLAETQDPARWREILSTARFTPPLPLLLAGIELPDGTYSPDTPLAQNVPYASAAQQMAQDHVADIPSGFELAVGLEIDDGMPSFLAWFRPLQSVGACPGTADAAPPAPVGQPAAAVAQWFSVVSAQPVPEHDGRLATARQAADAYMHRSKAENTLRTYRAAVRSWCRWAASHALPALPARSEDVAAYLADMALQGRRTSTIDLHRAALRYLHHLAQIAVPTAHPMVTATLAGIRREAKEVLPRQKTALTWDRLVRVVEAISSHDLVGARDRVILLLGFAGAFRRSELAALKVDDITVDEDGMQIRLGRSKGDPQRKGTLIGIPRGLTRNCPVLAYETWLRQAGITEGPVFRRIWSARGYRAGATPVGTPPRIGPHALSDRAVTDIIRKRCGDTHLEGDFGGHSLRRGAITTGAKDGYDLLELKRFSRHKSLQVVETYIDAASIKARHPGRSRF

SEQ ID NO: 1268 - protein, 478 aa, Kozakia baliensis
MLSDVRVLGSAVHARRALLKRVDPRTQARLDGVDPLAAAPILSSARFTPPLPLLLAGHALADGNETPDYMIGAAFPDAATAEQAARRHLGDAPSGFDVAVGLEIEVDAPRFVAWLRRQERVSVHASDPPSLPPAPVGQAPATVARWFALVSSQPVPQPDGTLRTARQAVEAYVQRSKAVNTLRSYRAAVRSWCQWASAHDLPALPARSEDVAAYLADMALRQRKTRTLDLHRAALRYLHHLAHITVPTSHPLVSATLAGIRREADHPAPLQKTALTWEKLTQAIDAMEGDDLVALRDRAILLLGFAGAFRRSELAGLAIQDIAIDEEGLQIRLTRSKGDPSAKGVFIGIPRGITRHCPVRAYEAWLRASCLTEGPVFRRVWRSRLPTPGVVPPRSKIGAAALSDRSVAEIVRQRCGGAGLEGDFSGHSLRRGAISTGAQDGYDLLELKRFSRHKSLQVVETYVDAASVKKRHPGRSRF

SEQ ID NO: 1269 - protein, 348 aa, Deinococcus swuensis
MTEGALVLASRWSNAANRRREGLRAAHEQNADALTDLLVTYMRLKSSRGARVSQLTLDHYCESVRRFLAFTGPPESPERALNQLAAEDFEVWMLTMQQASLSASSIKRHLYGVRNLMKALVWAGALASDPSAGVRPPSDTTPAHAKKQALSVARYAELLALPASMHPGDTLRAHRDTLLLELGGSLGLRAAELVGLNATDIDLNERQLRVLGKGSKGRTVPMTARVERSLRLWLMSRSSLQALNKLETPALLVSLSGRNYGGRLTTKGARTIAATYYQELGLAPELWGLHTLRRTAGTHLYRATRDLHVVADVLGHASVNTSAIYAKMDTEVRREAMEAMERLRDSND

SEQ ID NO: 1270 - protein, 401 aa, Bifidobacterium longum
MARRKTPTVEYTINGVTRERKKRTETFGTLEMLKSGKWRVKYYLNGHRYATSAFDDKMEAERYRAELEAERRAGTLKPPAAIKATNFKEYAHTWIEQHRTSKGKPLAPRTKAEILRMLEHGLSYFDPYSLTVIDAPLIRKWHAKRCKDAGATTAGNEARVLKAILQTAVNDDVLEKNPVPGELTRSKTGKEHRAPTTGELKRILDHLEGQWRVAVLIAAFGGLRAGELSALERQDIEVRNGRVVIHVTKQAQWLDGEWIVKPPKSVDGVRFVTLPEWITPDVETHLRRNVSQFPNCRVFVTSRGAKYVSTATWGRVLHKAMADAGIDAPIHWHDLRHFFGTNLAKSGVGIKELQAALGHGTPAASLSYLEQEHGLTAELANRLPRLDDSSSLIVFPRKATA

SEQ ID NO: 1271 - protein, 337 aa, Hymenobacter psychrotolerans
MSTEITRIPDEPQALGSQLSTAAANVARYIKAGLEGADNTVLAYSADLKSFGDFCQLHGLNQLPADVATLARYVADLADIPRKLSTIRRHLAAIHKHHQLRGYLSPVRADELALVMEGITRTLGKRQKQAPAFTVEELKESIRRLDVTTTAGLRDRALLLLGFAGAFRRSELVALDVEHLEFTEKALIVHLAKSKTNQAGEVEDKAVFYAATSAFCPVRCTRAWLQQLGRNTGPLFVSLKRGKVKGQAMPTLKRLSPLRVNELVQLHLNHDEDGHKVPEKNYSAHSLRVSFITISVLRGQSNRFIKNQTKQKTDAMIDRYSRLDDVVSFNAAQNLGL

SEQ ID NO: 1272 - protein, 387 aa, Unknown
  source: /note="Description of Unknown: Unclassified Variovorax sequence"
MQPDSLPAVLSVHPVLDPARLSRLTEESARELIRQGQSANTRASYQGAMRYWAAWFAARYGQELKLPMPVPVVVQFIVDHAERELVLEDADEAAAPAGKKTRRKVAKKVPLVFDLPPEVDQVLVAHGYKKKLGAYAQNTLVHRLAVLSKAHQNVNVDNPCNHTQVRELIKNVRSGNAKRGVKPHKQAALTKAPMDALLATCDDSPRGKRDRALLLFAWASGGRRRSEVADAIMENLRKVDSRGYLYKLGHSKTNQDGKENPDDAKPVSGKAAAAMDAWLEVSGITEGPIFRRILKGGKVLDEPLDPTAVRKIVKRRCLQAGLPGDFSAHSLRSGFVTEAGRRKMDPADAMAMTGHRHYETFMGYYRAEDPLDRKASRMLDGDDAAVE

SEQ ID NO: 1273 - protein, 441 aa, Vibrio sp.
MTYLVYSSDVFKETELRKLDDGTFHCQPTNDNIGSLPTLFYQNGIFNYEANSYLFYLKAIKKAEDLSPCAQALRAYYQFLEDNGLNWDNFPPVKRLKPTYLFRSHLLKQIKQGELAHSTASVRMNQIVNYYKWLMHDGYLCIKNEKEAPFKMEFVSIQNNGTLAHISPTFTIETSDLRIKVPRDADSKNIRPLSPLSIDALSVLTHHLLRTSEELRLQSLLAIDTGMRIEEVATFTLDALDTAIPLAESQYRFEMLLCPRSTGVQTKFLKTRTVEISSNLLQLLNQYRVSERRLKRVAKLNEKIEQLDNEVPPFTQKKIELLDRSKRHEPLFISQQGNPVTGKIIESRWVEFRAEIRQAEPSFSHRFHDLRATYGTYRLNDLLEANLPVVECMELLMGWMGHKNESTTWKYLRFLKRKEAFKVKFGILDSIMHEALGGEDE

SEQ ID NO: 1274 - protein, 419 aa, Marinobacter similis
MTSKARFPGYPLFDTAELIHEQADLELYPGLQAALMALPQSHRDDFHIAQRFLVKYSDVSGTYNRFRSEIQRFLNYTWHIAKRHLSQADSDLLSSYFSFLKTPPASWVSRGIYPAFFDSNDQRHQNPDWRPMAQRSKDSNAPYSVTQASLNASRTALQTFFKYLMAQDYLQRNPLLDVRKRDRNAKPSLDKDADAEVRRLTDWQWSYLLETLTQLASANPKCERNLFVIVTMKSLFLRVSELAPRPVDRGQMRTPSFSDFRRTIVDGEAYWIYSIFGKGDKTRQVTLPDAYLSYLKRWRLHLGLTSPLPVPGESTPILPSAKGDAIGKRQVQRIYEQSIVATADRMEQEGYGDEARQLLAIRTETHYLRHTGASQAIEAGGDIRHISEELGHANATFTESVYVNSEQARRRTEGRRRLV

SEQ ID NO: 1275 - protein, 415 aa, Colwellia psychrerythraea
MARKVKPLTNTEVKQAKPKDKIYKLSDGDGLQLRIMPNGSKQWLLDYFKPYTKKRTSFSLGSYPDVTLANARAKRASSRELLAQDIDPKEHKEDHHREQLLIASHTLKSVAEDWFAIKKTTITEVTAKSLWRKFENHVFPKLGHRPIDKILAPEAIEALKPLAAKGNLETTGKIIGHLNNIMTHAVNTGILHHNPLSGIRSAFSAPKVTNMPTIKPNELGKLMKVISYASIKLVTRCLIEWQLHTMTRPSESAKAEWSEIDLENRLWVIPAERMKMRLEHKVPLTKQSIEILERLKPITGHRTHLFPSHINHHKHCNVETANKALIRMGYKNRLVAHGLRALASTTLNEQEFNADVIESALSHVDKNEVRRAYNRAEYLDSRRELMCWWSEHIEQAVSGNLPVSTLKEQKIICNE

SEQ ID NO: 1276 - protein, 413 aa, Colwellia sp.
MLLTKPVPLYPPYIDLCDFDFDDYPQLDKIFSSNEPWWLEQFNWGKIFLTYIGRNKSAHTYERFRNDVERFLLWSFIVKKKPIDQLRKSDLLEYADFCWQPPVDWIGTSNQERFKITNGYSAANELWFPYKIQAPKSLKSQFVIDKKKYRPSQQTLSSMFTAIIVFYNYLMAEDFCIGNPAQIAKKDCRHFIIDSQVKEIKRLTGSQWQFVLDTAVEMADENAMFERNLFVIASLKTLFLRISELSERPNWSPTMGHFWQDDDENWWLKIFGKSRKLRDITVPIDFLPFLERYRASRGLLGLPSSNENSILVEKVRGQGGMTSRHLRRLVQSVFDQAHENMRRSEGENKALKLKEASAHWLRHTGASMEIERGRPLKDISEDLGHASMATTDTVYVQSENKKRAESGKRRKVD

SEQ ID NO: 1277 - protein, 381 aa, Colwellia sp. PAMC 20917
MPIKSKITVTNIKNLVPSDKRLNDTDISGFHARITPLGLITYYLFYRLNGKQVNYRLGVDGQMTPAQARDLAKSKIADVTQGVDVQALRKQERTSTKYSKLSSLQYFLDEKYTPWLKSRNPKTAEKTVKAFKSSFPKLMDFQLSDINAWEIEKWRNKRLADGVKPATTNRQINTIKGCLSRAVEWGVIDSHDLRNVKTLTVDNSKVRYLSKDEESRLRESLKSCDTAFLEVIVLLAMNTGMRKGELLSLQWHDINFDNKILTVDFQNAKSGNTRHLPLNTEAFNQLIHWQKLSGSEGYVFKGRNNEPLKDFPSLWAEILDEANITHFRFHDLRHHFASKLVMASVDLNTVRELLGHSDLKMTLRYAHLAPEHKAAAVNLIG

SEQ ID NO: 1278 - protein, 413 aa, Colwellia psychrerythraea
MSLTKPIPLYPPYIDLCDFVLEDYPQLEKIFSSNEPWWLEQFNWGKLFLTYIGRNKSNHTYDRFRNDVERFLLWSFIEKKKPIDQLRKSDLLEYADFCWQPPVTWIGTSNQERFKITNGYSAANEFWFPFKIQAPKSLKSQYIIDKKKYRPSQQTLSSMFTALIVFYNHLMAEDFCIGNPAQIAKKDCRHFIIDSQVKEIKRLTASQWQYVLDTAVEMADGDPVFERSLFVIASLKTLFLRISELSERPTWSPTMGHFWQDDDENWWLKIFGKSRKIRDITVPIDFLPFLERYRGSRGLLGLPARNENSVLVEKVRGQGGMTSRHLRRIVQSVFDLAHDNMRRSEGENRALKLKEASAHWLRHTGASMEIERGRPLKDISEDLGHASMATTDTVYVQSENKKRAESGKRRKVD

SEQ ID NO: 1279 - protein, 354 aa, Colwellia sp.
MKLTELSLADLNVVVPSKHQEAANKYFTDIFNLLPANTQRSYKSDLKQYYDFCFANDMPGLTPDMDLTETSIKAYVLAMCESQLAHNTIRHRMATLSKFMAIAKFPNPLKNSEYLRDFIKLQMKAHDIYARANQAPALRLRDLEEINTHVIPKTLLDFRDLAMINIMFDGLLRADEVAPVQLKHIDYKQNKLLVPTSKTDQSGKGSLRYISNTSISYVTAYIAEANIDRKSKREKVKDDPTRINKGILFRGISPKGTTMLPFDETVTRLAHMQKIAYVNIYKSLKRIAKKAGIDLPITCHSPRVGAAVTMAENGVSMKKIQDAGDWKSPDMPARYTEQADIGNGMSDIANIFKR

SEQ ID NO: 1280 - protein, 344 aa, Sphingomonas wittichii
MASEAPDPDGTLPATVPQSALPDILRADLERAAAYKKAARSSATHRAYGSDWTIYTDWCAARGLAPMPAHPEQIAAFVANQADAGFKPTTIERRVAAIGHYHRASNYPAPTAHPEAGGLREALAGIRNDKRVKKVRKNAADASALRHMLAEIKGASLRALRDRAILAIGMAAALRRSELVALTLQSVGILEHGLELYLGATKTDQAGEGATIAIPEGTRIRPKSLLLDWITAVRALEADVERAPADEAAMPLFRRLTRSDQLTGEPMSDKAVARLVKRYAASAGYDASKFSGHSLRAGFLTEAASQGATIFKMQEVSRHKTVQILSEYVRSADRFRDHAGDKFL

SEQ ID NO: 1281 - protein, 344 aa, Tardibacter chloracetimidivorans
MASDDPSDTGNLPVTVPQPALPDILRAEVDRAADYAKASRSAATQRAYASDWDIFTAWCDVRGMESLPATPAAVATFLASEADSGLKVPTIGRRLAAIGYHHRQAGFDPPQEMAGASAIKEVLAGIRREVGTRPERKAPADADALRDMIRTIEGDDLRAVRDRAMLAIGMAAALRRSELAGLLIDDVELPPEGLRLLIGRSKTDQSGEGAVIAIPEGRRIRPKALLLAWIDAAMEAARNLNNPLITFESGPLFRRLTRGGELTADPVSDRAVARLVQRCAAAAGFDPTDYAGHSLRSGFLTEAARQGASIFKMRDVSRHKSVQVLADYVRDFEMFRDHAGEKFL

SEQ ID NO: 1282 - protein, 344 aa, Sphingobium yanoikuyae
MASDDPSGSDNLPATVLQPTLPDILRAEVERAATYAKASRSPATQRAYASDWEIFTAWCDARGLASLPTTPAIVATFLAFEADRGIKANTIGRRLAAIGYHHRQADVDPPQEQSGAGAMLEVLAGIRNALGTRKDRKTPAHADALGAMLATIIGNDLRALRDRAVLAIGMAAALRRSELVALWIEDVELPTEGLRLWIGRSKTDQTGEGAVIAIPEGRRIRPKALLLAWTEAAMAGARELNNPLITFETGPLFRRLTRGGELTADPMSDRAVARLVQRCAANAGFNPAEFAGHSLRSGFLTEAARQGASIFKMRDVSRHKSVQVLSDYVRDAELFRDHAGEKFL

SEQ ID NO: 1283 - protein, 388 aa, Burkholderia cenocepacia
MVPRPDMVVASPELDGRSGSNRAVRRSLLTAETDREAIDAWVSSYDSPNTRETYRREAYRLWLWAVLECRKAFSSLGHEDLLEYRGFLLDPQPAHLWVSEGGQKFPRADPRWRPFYRKLNKAGQQQAMTILNVLFSWLVESRYLEGNPLSLSRRRKKPTEPQVHRHLSPEMWRQTLEYVEELPRGTSREQRHYHRARWLVSLFYLTGARISEVVSTSMGQFYAAQGEDGEIRWWLRIQGKGEKARDVPATSDLMAELAVYRESYGLSPIPHRDEVIPLMMRYGERMLPMTRSSAHVAIKQVFKGAAVRLRAKGPEWKNRADLLEAASAHWFRHTAGSHMASKMNLVTVRDNLGHGNISTTNTYLHTGNDARHQETEQHFKIEWPRPVK

SEQ ID NO: 1284 - protein, 395 aa, Moraxella bovoculi
MLTDTAIKRLKPSTDCTPNKPDKYSDGNGLQLIVRPTGTKVWLVAYRYHGRQTNITLGRYPTISLQQARLQALEIKQKLAQGIDPKTAKPNTVLFGDIANEYHTQRDRNNPINKGKYTVSKVTHKKDLSQYNNDIAPHIAHLDINAVTPVMILDIAKRIEKRGAYDMAKRAIRQIGAIFRHARDKGLYDRLPPTDGLEKRLTKRKQEHFARLEFHELPQFFSHVHHSTCEPLTKLAFKFICLTFVRTIEMRFMQWAEIDWDNYLWRIPPERMKMDKPHIVPLAPQAIEILHQIKAMGLSDEFVFYNPKTKKPVSENFLTQALKRLGYQGRMTGHGFRGIASTKLHELQYNHECIELQLAHAKADKVSMAYNGAEHLPYRVQMMKEWAKLIEHACQ

SEQ ID NO: 1285 - protein, 365 aa, Marinibacterium profundimaris
MPSEAEKSTSAPSGDFEDARIDDRDHDERGDIALPAHVAGTGTLDRLVNTARDYARVASSENTLKAYATDWTHFTRWCRMKGAEPLPPSPEIVALYLADLASGSGPSPALAVSTIDRRLSGLAWNYAQRGFILDRKNRHIATVLAGIKRKHARPSVQKEAILAEDILAMVATLTYDLRGLRDRAILLLGYAGGLRRSELVSLDVHKDDTPDSGGWVEIMEKGALLTLNAKTGWREVEIGRGSKDQTCPVHALEQWLHFAKIDFGPVFVGTSRDGKRASKTRLNDKHVARLIKRTVLDAGIRSELPEKDRLALFSGHSLRAGLASSAEVDERYVQKHLGHASAEMTRRYQRRRDRFRVNLTKAAGL

SEQ ID NO: 1286 - protein, 301 aa, Desulfuromonas sp.
MTADSDPVLLSFKCYLRDERNLSPHTRSAYMRDLLEFRQVITSLSGRENGFDWVAVDHLTIRRYLAYLHKRNRRTTIARKLSALRTCFRFLVREGVVQSNPADLVATPRRETFLPQTMTIDEVFALLEGKGLGESSRLRDKAIFELLYSSGLRIGELTSLDIGRVDMEQRLVRVVGKGSKERIVPIGSKAREALVAYLEARSWPAEKEPLFLNFRGGRLSARSVQRHLKQLLLAAGLSTELTPHSLRHSFATHLLDGGADLRAIQELLGHSSLSTTQRYTHVSMEQLTAVYDKAHPRSRKK

SEQ ID NO: 1287 - protein, 338 aa, Thermomonospora curvata
MDGPTLQDLAERWLDHKRASGRGMSDNTEAAYRADLNAWGRALADHHAIDTPDQTRPLEALHTGHLTAEALTAAAASFYREGKTAATRSRRISALRGWCAWLVRTGHLTADPTTDLETPRLPRRLPVALTDAQLAAIVQAASTPWQGARAQWVRLDRALLALFAGAGARTGEVVALRVGDVICEEDGGGLLRLRGKGGAHRNVPLHADAMQPVTDYLDERRALLGPFDAEDPLLVARNGKAITTGMIEYRVDQWFRRAAVRRPEGELAHVFRHTYAVGVLQNGASLNELQAVLGHQNLATTSIYTKVAAEGLKDVARVAPVLRHLRATRPAPTSAPPG

SEQ ID NO: 1288 - protein, 353 aa, Thermomonospora curvata
MRPAEFEPICVQEAVDRYVEMVRAKALTGQFSPATAEVYCRDMAVFAELAGPGRLLDDLDGADVDAVLLAFARRPDGRRRRHDPPPAGRALQSAASQARFRRSVSVFFRYAATAGWVRLDPMRAVTVMPRQRGGLRAERRALTAEQAGGLVQAARRLAECGPAEARTGRAARRDQRTEIRDGLVVLLLATVGPRVSELTGANVEDFFVNDGRWYWRIFGKGGRTRDVPLPEAVARVLQAYLERGRPLLDRGVEPKALLLSWRGRRLARGDVQAVIDRVLARVEPSRRRAVTPHGLRHTTATHLLAAATDMDAVRRVLGHADLATLSRYRDELPGELEAAMRVHPLLKDQAPGG

SEQ ID NO: 1289 - protein, 382 aa, Pseudomonas sp. 34 E 7
MDVLNITNQISQVDETPLDLHFLTLNAQEAAADFIAAGTAANTVRSYRSALAYWSAWLQLRYGHALGDTHLPVEVAVQFVVDHLARPTDDGKWVHLLPASIDAALIRAKVKAKPGALAYNTVSHRLSVLGKWHRLNSWDSPTDAPVLKSLLREARKAQSRQGLSVRKKTAIVIESLQALLATCTDGLRGQRDRALLLLAWSGGGRRRSEVVNLQISDVRQLDTDTWLYALGVTKTNTGGVRREKPLRGPAAEALSAWLLAAPAESGPLFRRMYKGDKVGSTGLSADQVARIVQRRAKLAGLKGDWAAHSLRSGFVTEAGRQGVPLGDVMAMTEHRSVSTVMGYFQAGALLESRATTLLKFSTVENEDTSGGHHLASDSKNQA

SEQ ID NO: 1290 - protein, 314 aa, Pseudomonas fuscovaginae
MSELDRYLHAATRDNTRRSYQAAIEHFEVGWGGFLPATSDSVARYLAAHAGVLSINTLKLRLSALAQWHNSQGFADPTKSPVVRQVFKGIRALHPVQEKQAQPLQLQHLEQVIASLDGEVQAALALQDRPRLLRARRDTALILLGFWRGFRSDELCRLEVGNVMAQAGAGITLYLPRSKSDRDNLGRRYQTPALQRLCPVQAYIEWINCAALVHGPVFRGIDRWGNLGEEGLHANSIIPLLRQALGRAGIAAEHYTSHSLRRGFATWAHRSGWDLKSLMSYVGWKDLKSAMRYVEASPFEGMSLAVEKPVAQES

SEQ ID NO: 1291 - protein, 316 aa, Pseudomonas asplenii
MGKADLYLKAGARENTRKSYRAAIEHFEMDWGGYLPTTGDGIVRYLANYAGHHSINTLKQRLAALSQWHITQGFPDPTKTPDVRRVLKGIRAVHPAKTKQAAPLQLSQLQQVVGWLDTEANGAHHRGDHKCEVRHRRSIALVLIGFWRGFRGDELARLEIEHTHAVSGEGISFFLPYTKSDREHQGATYHTPALKMLCPVEAYINWITIAGLASGPVFRGIDRWGNLSTEGINPHSLIPMLRRILAEAGLPAAMYSSHSLRRGFATWATANGWDIKALMTYVGWKDMQSALRYIDASASFAGLAVGKRGSELQIGR

SEQ ID NO: 1292 - protein, 316 aa, Caulobacter henricii
MATSSTFIVPAIVADTSDDAGERFLEFFAATIRNANTRSAYMRAVEHFLGWRGVAGLASLGDIRPLHIAAYIEECQGLFSAPTVKLRLAGLRSLFDWLVRTGVMASNPTTSVRGPSHDVQRGKTPILAADEAKRLIASIPADTPVGLRDRALIALMTYSFARVSAATGMNVEDLIQTAGRSWVRLHEKRGKVHELPVHHKLLDHLDAYLAVAGHRDQPKAPLFRSAKGRSGALSNGRLSRHDAYAMVRRRAVAAGIVAKIGNHSFRGTGITTFLLNEGTLELAQEMANHSSPRTTKLYDSRRDGITQDAIERIRIE

SEQ ID NO: 1293 - protein, 379 aa, Pantoea vagans
MAALKRATGNDVITDSTITAARSAHVGRHVLIWLEQVKAASLSELDNFGDEGTVEQVMKVWVKLSLLISRRRPEIAVSSLLKHVLPNIGSQPLKTLNRLRLNRLYNILIADGKKEEARRVFALTKQFLAWAEMQGYLDHSPIASMKKRDVAGRATPPRSRQLTDAEIWVFWHGLDNWALSEQARWALRLCLVSARRPDEIVQAQKGEFDLQLGLWMQGTRNKSQREHVLPISPLMRQCIEALLNAADPDSPWLVSAPRDPQQPLSKGALNQALRRMIRAPRGLGLEPFTPRDLRRTARSKLSALDTPNDVARKIMNHALEGIDRVYDTHDYLSQMRSAMNTFSDAVKQIIECESYHLLRHRYDGETLILSNLSIMAMSR

SEQ ID NO: 1294 - protein, 374 aa, Rahnella sp.
MSKIGSVTTVEGDFAAGNVGQHVLAYLQNVKMTPLAKLDDFDEEGNATVGQVINIWIRLSLILTRRRPEIAVSSLMKHVLPVIGEVPLNKITRLRLNRLFNVLLADGKVSEAKRVFALCKQFFGWAETQGYLAHSPLSTMKRRDVGGRNTPPRERTLTDAEIWVFWHSLDLWDISEQCRWALRLCLLTARRPDEVVRARKDEFHLQIGIWRQGTRNKSARDHNLPLTPLMITCINALLSASPKHSPWLVPSPLDAQRPLSRGAVTQVIRRLLRAERGPGIDAFTTRDLRRTARSKLSSLNVPNDVARKIMNHSLEGIDRVYDTHDYLPQMKQALEAFSDNIQGIIDAPDYYDLRHHFEGESLHVRESSLLFMER

SEQ ID NO: 1295 - protein, 368 aa, Pantoea agglomerans
MTPDLTQIPARSAHVGRHVLIWLEQVKKASLSELDNFGDEGTVEQVMKVWVKLSLLISRRRPEIAISSLLKHVLPNIGSQPLKTLNRLRLNRLYNILIADGKKEEARRVFALTKQFLAWAEMQGYLDHSPIASMKKRDVAGRATPPRSRQLTDAEIWVFWHGLDNWALSEQARWALRLCLVSARRPDEIVQAQKAEFDLQLGLWMQGTRNKSQREHVLPISPLMRLCIEALLRAADPDSPWLVPAPRDPQQPLSKGALNQALRRMIRAPRGLGLEAFTPRDLRRTARSKLSALDTPNDVARKIMNHALEGIDRVYDTHDYLSQMRSAMTIFSNAVEQIIRCESYHLLRHRYDGETLTLDDLSVMAMSR

SEQ ID NO: 1296 - protein, 368 aa, Pantoea agglomerans
MTPDLTQIPARSAHVGRHVLIWLEQVKKASLSELDNFGDEGSVEQVMKVWVKLSLLISRRRPEIAISSLLKHVLPNIGSQPLKTLNRLRLNRLYNILIADGKKEEARRVFALTKQFLAWAEMQGYLDHSPIASMKKRDVAGRATPPRSRQLTDAEIWVFWHGLDNWALSEQARWALRLCLVSARRPDEIVQAQKAEFDLQLGLWMQGTRNKSQREHVLPISPLMRQCIEALLRAADPASPWLVPAPRDPQQPLSKGALNQALRRMNRAPRGLGLEAFTPRDLRRTARSKLSALDTPNDVARKIMNHALEGIDRVYDTHDYLSQMRSAMTIFSDAVEQIIECESYHLLRHRYDGETLTLDDLSLMAMSR

SEQ ID NO: 1297 - protein, 372 aa, Serratia sp. Leaf51
MTEQISETETDFAAENVGRHVLVYLQQIKATPLAKLDDFDEEGNATVGQVINVWIRLSLILTRRRPEIAVSSIMKHVLPVIGDVPLNKITRLRLSRLFNVLLAEGKISEAKRVFALCKQFFSWAETQGYLPHSPLGSMKRRDVGGRNTPPRERTLTDAEIWIFWHGLDLWDISEQCRWALRLCLLTARRPDEVVRARKDEFNLRISVWRQGKRNKSARDHSLPLTPLMLVCINALIAASPKNSPWLVPSPKDPGKPLSRGAITQVIRRMLRAERGLGIAPFTTRDLRRTARSKLSALDVSNDVARKIMNHSLEGIDRVYDTHDYLPQMKQALDAFSDNIHDIINAPDYLSLRHKFDGEFLQIPQISLLYMEN

SEQ ID NO: 1298 - protein, 366 aa, Pseudomonas aeruginosa
MNTTLLPLHSGIAPLSVDRLDADARTAAAAFVAAGTAANTVRSYRSALAYWAGWLQLRYHRHLEDSALPEAVAVQFILDHLARPADGDWVHLLPPEQDAALVDAGVKAKLGALSYNTVRHRLAVLAKWHDLKSWPSPTETVAVKTLLRDARKAQARQGVSVRKKTAAVREPLEAMLATCTDGVRGLRDRALLLLAWSGGGRRRSEVVGLQVGDVRQLDADTWLYALGVTKTETEGMRREKPLRGPAAQALAAWLAVAPAATGPLFRRLYRGGRVGTAGLSSDQVARIVQRRAKLAGLEGDWAAHSLRSGFVSEAGRQGVPLGEVMTMTEHRSVPTVMGYFQAGTLLGSRATRLLALPLEVPDYPEE

SEQ ID NO: 1299 - protein, 366 aa, Pseudomonas aeruginosa
MNNTIPLLSGDSPLLAVDRLDAEARAAAAAFVAAGTAANTVRSYRSALAYWAGWLQVRYGQTLEMGPLADTVAVQFILDHLARPADGDWVHLLPPALDAALVDAGVKAKLGALRYNTVRHRLAVLAKWHDLKSWPSPTDSAAVKALLREARKAQARQGVSVRKKTAAVREPLEAMLATCSDGVRGLRDRALLLLAWSGGGRRRSEVVGLQIGDVRQLDADTWLYSLGVTKTETEGMRREKPLRGPAAQALAAWLAVAPAATGPLFRRLYRGGRVGTAGLSNDQVARIVQRRAKLAGLEGDWAAHSLRSGFVSEAGRQGVPLGEVMAMTEHRSVPTVMGYFQAGTLLGSRATRLLALPLEVPDYPEE

SEQ ID NO: 1300 - protein, 295 aa, Pasteurella multocida
MQEQLDKYWNYLRIERQVSPHTLTNYQRQLYRIVDILAENGITSWQAVTPSIVRFILAQSNKDGLKERSLALRLSVLRRFFTYLVQQQDINVNPATGVSAPKQNRHLPKNIDAEQVQQLLNNDSKEPIDIRDRAILELLYSSGLRLSELQSLNLNSINTRVREVRVMGKGNKERIVPFGRYASHAIQQWLKVRILFNPKDEALFVSQLGNRLTHRAIQQRLEVWGIKQGLSSHLNPHKLRHSFATHMLEASSDLRAVQELLGHSNLSTTQIYTHLNFQHLAEVYDSAHPRAKRKK

SEQ ID NO: 1301 - protein, 280 aa, Unknown
  source: /note="Description of Unknown: Pasteurellaceae sequence"
MKSYEKAIRQLQKNCSIQYPDEISDSLILQWRKRVVGQSIIEVTWNSYIRQLKTIFKFGIEKQLLPFTKNPFDGLFIREGKKKRKVYTSSDLKKLSFGITESKHLPSILRPLWFTKTIIMTFRYTAIRRSQLNKLRIKDVDLLNQVIHIPSEINKNHEYHILPISTTLYPYLKKLLTELSKLNQPVESQLFNINLFSNAVKRKGEKMTNDQVSYIFKVISKYTGIISSPHRFRHTAATNLMKKPENLYIAKQLLGHKDVKVTLSYIEDNIDSIREYTELL

SEQ ID NO: 1302 - protein, 291 aa, Lysinibacillus fusiformis
MITLKDAWNRYILLLQSLKKSAATMKQYNMDGQHFLSFAHEKNYLYVDHQFQELLLIYCHYLKETYSNINTFNHKIATMRGFVDFIFLREWMEPFDYQHILQPRKRQKEALQVLTTKQIGQMANVWPTYFQYAKTVEHAWLARRNGCIVQVLMETGCKPAELVRMKWSHFQKEKSTLFIANQNGRREVKCSPILMDMLAHYKEETEAMHDKEVEEWVWVSEASMTKPITTKTVERIFQTMSKDIGKNVRATDLRYTVMQRAFQEEKTLEHIQQEMGYVRKWVLTERQQRFE

SEQ ID NO: 1303 - protein, 360 aa, Acidovorax cattleyae
MPLPKPGNLPALQPEMLSDATAQAVEELMREGESANTLASYRSALRYWAAWFNLRYGQPITLPVPPAAVLQFIVDHAQRSSADGLLHELPPAIDAVLVQAGFKGKPGPMALNTLVHRIAVLSKTHQLKEVENPCQDAKIRDLLAKTRRAYGKRGDLPRKKDALTKDPLMAMLETCDLSTLKGLRDRALLLFAFASGGRRRSEVAGADMKHLRRHGVSSFTFVLAHSKTNQHAADRPENYKPIAGMAGEALQAWVEAARITEGPVFRRVLKGGRLAGALSPAAVRDIVKERARAAGLSEDYSAHSLRSGFVTEAASQNVPLADTMAMTGHRSVATVMGYFRSTGSSQAAHLLDPKAPPDRS

SEQ ID NO: 1304 - protein, 358 aa, Acidovorax sp. Root217
MRLPALKTHAALEPGVLSDMTALAVDQLMREGESANTLASYRSAVRYWAAWFNVRYGQPITLPLPPSAVLQFIVDHAQRTTAEGLAHELPQAIDAVLVDAGFKGKPGPMALSTLVHRVSVLSKAHQVRDMKNPCQDAQVRELLSKTRRAYAKRGALPQKKNALTKDPLMAILATCDATTLKGLRDRALLLFAFASGGRRRSEVASAQMRHLQRSGPTSFVYTLAHSKTNQTGSDRPENHKPIQGMAGEALQAWLEATGITEGPIFRRVRKGGRLGEALSAAAVRDIVQERARAAGLPDVFSAHSLRSGFVTEAATQKVPMADTMAMTGHRSVASLLGYFRVSDASQAARLLEEEGPQA

SEQ ID NO: 1305 - protein, 358 aa, Acidovorax sp. Root219
MRLPALKTHAALEPGVLSDMTALAVDQLMREGESANTLASYRSALRYWAAWFNVRYGLPITLPLPPSAVLQFIVDHAQRTTAEGLAHELPQAIDAMLVKAGFKGKLGPMALSTLVHRVSVLSKAHQVRDMKNPCQDAQVRELLSKTRRAYAKRGALPQKKNALTKDPLMAILATCDATTLKGLRDRALLLFAFASGGRRRSEVASAQIRHLRQSGPAAFVYTLAHSKTNQTGSDRPENHKPIQGMAGEALQAWLAATGITEGAIFRRVRKGGRLGEALSAAAVRDIVQERSRAAGLPDVFSAHSLRSGFVTEAATQKVPMADTMAMTGHRSVASLLGYFRVSDASQAARLLEEEDPQA

SEQ ID NO: 1306 - protein, 348 aa, Burkholderia cenocepacia
MAALTKTPSGTWKATIRRVGWPTVAKTFRTKRDAEDWARRTEDEMVRGVFIQRAPSEKTTVADALDRYEREIVPTKKASTQRREGARIRELKEHFGKYSLAAVTPDLVGRYRDDRLAQGKANNTVRLELALLGHLFNVAIKEWHIGLIFNPVSNIRKPRPGEGRNRRLSGREQATLLTAVDEHTNPMLGWIVRLAIETGMRQSEILGLRRGQVDLERRVVRLTDTKNNDARTVPLTKLAASVLQSALANPVRPIDTDLVFFGEPGRDKKRRAYQFTKVWNGIKKRTGLVDFRFHDLRHEAVSRLVEAGLSDQEVASISGHKSMQMLRRYTHLRAEELVGKLDALSAAR

SEQ ID NO: 1307 - protein, 325 aa, Thermobaculum terrenum
MIECFWVYFTNRREPLFDGLSSVEEFISHLESERHFSNNTTAAYKNDILQFHDWLQGKDHINSWAAVTSSDIQDYLLYLKGNQDRAYAPSTQARKMAAIKSFFQFLVAKSVVDQNPASDLISPRVQKYWPKAISVQEVNMLLAAASDSETPEGIRDRAMLEVLYRTGLRVSELVSLNVDDINLDESHLKCIGRGKTRKVPLSQPAVDVLKLYLERSRPLLVRGQDEQALFVNHRGQRLTRQGFWLILKAYASEAGIKGITPHTLRHSFAAHMIDGGIDLRQVQEWLGHASITTTQVYRQIKSNSHSEKIIDIKSREERIPEEVAK

SEQ ID NO: 1308 - protein, 310 aa, Thermobaculum terrenum ATCC BAA-798
MFDGLSSVEEFISHLESERHFSNNTTAAYKNDILQFHDWLQGKDHINSWAAVTSSDIQDYLLYLKGNQDRAYAPSTQARKMAAIKSFFQFLVAKSVVDQNPASDLISPRVQKYWPKAISVQEVNMLLAAASDSETPEGIRDRAMLEVLYRTGLRVSELVSLNVDDINLDESHLKCIGRGKTRKVPLSQPAVDVLKLYLERSRPLLVRGQDEQALFVNHRGQRLTRQGFWLILKAYASEAGIKGITPHTLRHSFAAHMIDGGIDLRQVQEWLGHASITTTQVYRQIKSNSHSEKIIDIKSREERIPEEVAK

SEQ ID NO: 1309 - protein, 252 aa, Candidatus Protochlamydia naegleriophila
MASIFKRKNKDGTTHWRAVIRVKGYPTVCNHFARKQEADDWAIDVERQIKQGQFNFSKHKNQHTFSELVDHFINNGALEHHRSAKDSLRHLNYWRERLGNYALVHLTPERLGKERLLLIETPTNRGEKRSSATVNRYMATLSSVLSYACRQLRWIDDNPCFNLIKLKENPGRDRVLTQEEVQRLMAACRQSRNGYLYCIVLLAFTTGMRQGEILSLTWNQIDFDNKLAHLKETKNGTPRSVPLVEAVIDELR

SEQ ID NO: 1310 - protein, 347 aa, Lactobacillus floricola
MASIIKRGKSYRVEISNYKHGKNKRISKTFKTKSEAQRWAMQNEIAKGNGVDLALRKDKFSDFYSNWIYLVKKNDVRSATFLNYTRTIPIVKKLFKNITLGELNDLVVQMKIDEYGETHSRKTTTELLLKIRTSLRYAYGRGLITSDFAGLIKTRGKELSKRNSALSISDFKKLRSYLLKHHEKDFYILVLLALETGARRGELLGLTNKDIFKYGISINRSISPSSSDTRLKTKRSKRNISINENVYDILKTVTEKSNGYLFSFDGFQQSAKLARLLKKLDIPKTTFHGLRDTHASFLFSNDNIRIDYISQRLGHSNLQTTMNYYLELMPEKKHLQDADALSLLDSL

SEQ ID NO: 1311 - protein, 395 aa, Bacillus azotoformans
MASFRKRGCTCEKKKCTCGAKWEYRIKYVDRQTGKTKEKSKGGFTSKKEAQLAAAEEELKINQFGFAENGNEVVLNYFSEWLEVFKKPNVKPITYSVQERNVRLNILPRWGKYRLKDITRTEYQKWINELRDHYSEGTVRRIHSIFSSAIHDAVHEFHIIRENPIQKIKIPKDVENTNRVQYFSKEQLEKFLNSLKTPQKNAKYKHSIQYYVLFSLMARTGIRIGEALALTWDDFNEKEKSISITKTLVYPLNSTPYISTPKSLKSVRIVKLDEQTVKLLKKHKINQNEVILRYKNYKASKDNVMFHQHDGRWLRTNVVREYFKEVCKRTDLPVLSPHALRHSHAVHLLEAGANIKYVSERLGHASTKVTADTYLHITEKIENEALELYSQYIKF

SEQ ID NO: 1312 - protein, 382 aa, Streptococcus pneumoniae
MKYNKTKYPNIYYYETAKGKRYYVRRSFFFRGKKREKSKSGLTTLPQARAALVELEQQIQEQELGINTNLTLDQYWDIYSEKRLSTGRWNDTSYYLNDNLYKNHIKAKFGSTLLKNLDRNEYELFIAEKLQNHTRYTVQTLNSSFMALLNDAVKNGNLLSNRLKGVFIGQSDIPAANKKVTLKEFKTWIAKAEEIMPKQFYALTYLTIFGLRRGEVFGLRPMDITQNDSGRAILHLRDSRSNQTLKGKGGLKTKDSERYVCLDDIGTDLIYYLIAEASKIKRKLGIIKEQHKDYITINEKGGLINPNQLNRNFNLVNEATGLHVTPHMMRHFFTTQSIIAGVPLEQLSQALGHTKVYMTDRYNQVEDELAEATTDLFLSHIR

SEQ ID NO: 1313 - protein, 306 aa, Vibrio splendidus
MPNKKSSRRKKFERKARNFFNFHYFGLGKNKKEAKGKLRSQSTLFRHVETAAFIQERMGASMLIDITPQMALDYLSSRVGKVCSKMLANERRVLERIVYLHEPERRLYIEEKLDPREWVNRAYTHEQIHQIMTHQTPENQLATALCFTAGLRVQELLTLQRFDEASASKDRKWRSDLFSGLQGEKYVVKGKGGLYRAVMIPHCLAKKLERHRLSEPRQIKDRKCTITNRYNITGGKKFTDAFSQLSKRVLGWSHGAHGLRYTYAQDRLNRSIPDKSYEEKLEIISQELGHFRKEITPHYLHRGTCS

SEQ ID NO: 1314 - protein, 365 aa, Aromatoleum aromaticum
MNLDDMLPALASNVAVMDPDALDPLTQQAVDEILAEGTSANTDVSYRTALRYWAAWFALRYRKPLKFPVPVPAVIQFIVDHAQRSTPGGLRCDLPDSLDEVLVEKGYKAKLGPMALSTLNHRVSVLSSLHKRSPELENPCRSPAVRDLIARTRRSYAKRGERPKGKAALTRELLEQLVGTCDDSLKGLRDRAILLLGWASGGRRRSEIVSLRVEDLKRVGPDEFIFELGASKTNQSGTVKADDLKPVVGAAGSALADWLAATGLASGPLFRQIDKSGSLRGALSASAVRTIVRERCLLAGLDGDFSAHSLRSGFVTEAAKQLIPLGETMALTGHRSIPSVMRYFRAGSVTTSKAAKLFDEGDKTE

SEQ ID NO: 1315 - protein, 306 aa, Candidatus Pelagibacter sp. IMCC9063
MSNIINKLNELEKETNLNLGSSKSLNTLRAYRSDFSDFKNFCSDLNLPYLPTHIKAVSLYMTHLSKSNKYSTLKRRLASINVIHSLKGFHIDTKNPLIKDNLEGIKRKIGIYQNGKKPLLINNLHKIIDVIDYYKIQKYVRSTRDKAIILIGFSGGFRRSEIVNLKKNDLEFVEEGLKISLRRSKGDQYGEGMIKAIPYFNNKKYCAIIALQDWLSARTNNNDLIFPYSDKTVSLILKKYLNIIGLDSRLYSGHSLRSGFATSTASHGADERSIMAMTGHKSTEMVRRYIKDSNLFKNNALNKLND

SEQ ID NO: 1316 - protein, 366 aa, Mycobacterium phage Milly
MASIRSVSRKDGTTFTQVRYRLNGKQTSTSFDDGAHAVEFKRMVEQLGAAKALEVLETTDAASRNFTLAGWLKHYLDHKTGVEKSTIYDYRKMVEKDITPVLGAIPLAALTAEDVAKWVQGLADKGLAGKTIANKHGFLSSALNVAASAGHIKANPAVGGAGLVAVPRTERAEMVFLTADQYAKLHDNMPLRWQPLVEFLVASGARWGEVTALRPSDVNRAEGTVRISRAWKRTYARGGYELGAPKTNKSRRTINVDTAVLDRLDYSGEWLFTNVRGGPVRGHNFHENHWQPALKKAGLDGLDVKPRIHDLRHTCASWLIAAGVPLPAIQQHLGHESIQVTIGVYGHLDRSSGRTVAAAIAAALGR

SEQ ID NO: 1317 - protein, 455 aa, Streptomyces canus
MGKTYDVRIWSVRQRKDRGQTSAELRWKTGETPHSQTFRTKTLAEGRRAELLRAAHAGEPFDESTGVPLSELRQRNDVSWYQHAREYIEMKWQHSPGSTRRTLAEAMATVTPALVKDTKGMADATTVRTALYSWAFNVSRRDQDPPDEVAAVLAWFERKSLPTSALADRMQVRAALDTLTRKLDGTTAAASTIRRKRAIFHNALGYAVDAGRLTDNPLPQVQWKAPEQVAEELDPASVPDPRQALALLDAVRTQSPRGRRLVAFFGCMYYAAARPAEVIGLRLQDCDLPRRGWGTLQLRETRPRSGSAWTDSGEAHDRRGLKHRPRKAVRTVPIPPDLVNLLRWHVMAYGVAPDGRLFRTQRGGLIQDTGYGEVWAEARARALTPAQCASLLAKRPYDLRHAAVSTWLSSGVEPQEVAARAGHSVAVLFRVYAKCLDGGAATANARIERALKNGS

SEQ ID NO: 1318 - protein, 303 aa, Paenibacillus sp. IHBB 10380
MLLKFAYQDFLDDRRFKNTTEKNIRNYQTMLGAFVEYCIQHEVVSVEDITYNHVRQHLMECQERGNKAGSINTKIMRIRAFLNYMVECEVITKNPAKRVKMQKEDVKINVFTDEQIRQMLNFYRRIKQRDKSYVAYRDYMMIVTILGTGIRRGEIISLQWSDIDFVNQTIAVFGKSRRKDTLPITDKLSKELAAYQIFCKQHWGDLSDYVFVKRDNNQMTENALMLVFKYLGQKMNFKDVRVSAHTFRHTFCHRLAMSGMSAFAIQKLMRHQNIVVTMRYVAMWGNELREQNDKYNPLNSLNI

SEQ ID NO: 1319 - protein, 305 aa, Unknown
  source: /note="Description of Unknown: SAR11 cluster bacterium PRT-SC02"
MNKLVVDIKSLELDTLKNLSNAKADNTLRAYKADYRDFLEFCTKHSFKSMPTEPKIVALYLTHLSKYSKFSTLKRRLASISVIHKLKGHYIDTKHPLIMENLLGIKRLRGSNQKAKKPLLINELKTIIDVIDKSKNKFLKKTRNKSLILLGFAGGFRRSELVSIDYDDIDFVSEGVKIFIKRSKTDQSGEGMIKAIPYFINEQYCPVKNLKNWINLSDIKTGKVFDISDKSVSLLIKKYAALAGLDEKKYSGHSLRSGFATSTAESGAEERNIMAMTGHKSTQMVRRYIKEANLFKNNALKKLKV

SEQ ID NO: 1320 - protein, 307 aa, Chryseobacterium koreense
MNKKTISQIVEFWKADKKMYVKKSTLSAYILLIENHLIPEFGSNSEIEEEQVQKFVFQKLEQGLSQKTVKDILIVLKMILKFGAKNKWIQFSPFQIQYPTVRENQQIEVLSRTHQKKVMNFIQEHFTFRNLGIYICLSSGIRIGEICALTWEDIDTDNGIIHIRKTIQRIYVIENGERRTELLLDSPKTKNSIREIPMSRELLRMLKPFKKIVNPTFFVLTNDSKPTEPRTYRSYYKNLMRQLEIPEIKFHGLRHSFATRCIESKCDYKTVSVLLGHSNISTTLNLYVHPNLEQKKKAIDQMFRALK

SEQ ID NO: 1321 - protein, 390 aa, Achromobacter xylosoxidans A8
MNALVSLDQMMVPAPPDGRKGRNRATSRSQLAAVDDRSAVLAWLARYTDSPATLASYRKEAERLLLWCVLQRGAALSDLTHEDLLLYQRFLADPQPAERWVMEPGQKPGRNSPRWRPFAGPLWASSLRQALSILNAMFSWLVEAGHLAGHPLALSRRKRRQAAPRVSRFLPEEHWDVVKAAIEAMPVGSERERLHASRCRWLFSLLYIGGLRVSEICDARMGGFFSRRGADGRERWWLRNHRQQAARPAWCRPRAILMTELMRYRKAHALSPLPLEGRRHAIGDDADRPGQAYGTSAIHELVKGVMQAAAAALRRRGSDFGAAAAHLEQASTHWIRHTAGSHLSEKVDLKVVRDNLGHANISTTSIYLHTEDDARHDATAAGHRVGWRSP

SEQ ID NO: 1322 - protein, 389 aa, Achromobacter xylosoxidans
MNALVSLDQMMVPAHLDGRKGRNRATSRSQLAAVDDRSAVLAWLARYTDSPATLASYRKEAERLLLWCVLQRGAALSDLTHEDLLLYQRFLADPQPAERWVMEPGQKPGRNSPRWRPFAGPLGPSSLRQALSILNAMFSWLVEAGHLAGNPLALSRRKRRQAAPRVSRFLPEEHWDVVKAAIEAMPVGSERERLHASRCRWLFSLLYIGGLRVSEICDARMGGFFSRRGADGRERWWLEITGKGSKTRLVPATGELMTELMRYRKAHALSPLPLEGEDMPLVMTLIAPVKPMARSAIHELVKGVMQAAAAALRRRGSDFGAAAAHLEQASTHWIRHTAGSHLSEKVDLKVVRDNLGHANISTTSIYLHTEDDARHDATAAGHRVGWRSP

SEQ ID NO: 1323 - protein, 389 aa, Variovorax paradoxus
MNTLVSLDRMMVPIHLDGSRGRNRASSRSQLAAVDDRSAVLAWLARYADSPATLSSYRKEAERLLLWCVLQRGAALSDLAHEDLLLYQRFLGDPQPAERWVMEPGQKPGRSSSRWRPFAGPLGPSSLRQALSILNAMFSWLVDAGYLAGNPLALSRRKRRQAAPRVSRFLPEEHWNVVKAAIEAMPVGGERERLHASRCRWLFSLLYIGGLRVSEICGASMGGFFSRRGSDGRERWWLEITGKGSKTRLVPATGELMSELMRYRKAHALSALPLEGEGTPLVMTLIAPIKPMARSAIHELVKGVMHAAAAALRQRGSDFEAAATHLEQASTHWIRHTAGSHLSEKVDLKVVRDNLGHANISTTSIYLHTEDDARHDATAAGHRVGWRSP

SEQ ID NO: 1324 - protein, 322 aa, Runella sp. HYN0085
MKENTVSQNVQATSPNTQLPHVLVGKVADYVRKGLEGSDNTQRAYRSDVYYFIEWCRENGQSEFPATTPTLSAYVSHLADTHKWASINRKLAAIRKLHELNNVELPTNDRGFKAVMEGIKRTKGIRQKQAPAFQMNELKKVLRTMETETHAGMRDKSLILLGFAGAYRRSELVDLNIENVEFNEDGAIITLTKSKTNQYGEAEEKAFFYSPEASLCPIRNLKNWIMRLERTTGPLFVRVRKGDRLTTDRLNDMTVYTTVKKYLGEKYSAHSLRASFITIAKINGANDSEIMRQSKHKTSLMIQRYTRIEDIKKHNAATKLGL

SEQ ID NO: 1325 - protein, 327 aa, Pseudomonas sp. LS-2
MRRRPRFRGENAMEKADRYLNAGTRENTKKSYRAAIEHFEVTWGGYLPTTGDGIVRYLAEYADQHAISTLKQRLAALAQWHITQGFPDPTKTPNVRQMIKGIRVIHPARVKQAAPLLLTHLERAINWLENEAAAAQARNDYKVLLRHRRSIAMVLVGFWRGFRGDELTRLTVENTQAYSGEGITFYLPYTKGDRQHEGTTFETPALKTLCPVEAYLNWITVAGIATGPVFRRIDRWGNLSDKAIQPHSLVPMLRRIFREAGLPEDLYSSHSMRRGFATWASANGWDIKALMSYVGWKDMKSALRYVDSSVSFGGLAVRSASARLSNP

SEQ ID NO: 1326 - protein, 312 aa, Terriglobus roseus
MTESTEIALWVSQEPETASQAPGLTPAQLQLRQMVLDSVTSPHSRRNYAKALDLLFAFAASRPLTRALLLEFRTSMEDLAPSTVNVRLAAVRKLVSEARKNGMLSHEDAANLTDIPNVKEKGTRLGNWLTKEQARELLGVPDRSTLKGKRDYAILALLVGCALRRRELASLTVEDIQMRENRWVIIDLVGKGGRVRTVAIPVWVKKGIDAWQAAGSIEKGPLLRSVSKGGKIGESLSDWAIWSVVTEAAKEIGIERFGAHDLRRTCAKLCRKAGGDLEQIKFLLGHSSIQTTERYLGSEQEIAIAVNDSLGL

SEQ ID NO: 1327 - protein, 342 aa, Piscirickettsia salmonis
MSNKSIKKIMIAESGAAISTTLSSSSRQFLENTLAQATKRGYAADLKIFFAWAEAHQTAAIPATAETIANFLADQASGILSVWLRQESQLINGRPVSVATLRRRLAAIKYAHKLNKIEPSPTDTAEVRETLKGIRRTLGAKPNAKSALMSQDIQLLIKYIPETITGQRDRAILLLGFAGALRRSELTSLELSDIEVQENGMLVYIRSSKTDQEQQGQVIGIARSENKANCPVGAIEQWLQSSMILSGPIFRRIFANGKIAITTLSDRTIYNIVKNYCQLAGLDASRFGAHSLRRGFVTSAAKAKVDPFRIMAVTRHKRLETVKRYVDEANLISDYPGADLLK

SEQ ID NO: 1328 - protein, 343 aa, Piscirickettsia salmonis
MSNKSIKKIMIAESGAAISTTLSSSSRQFLENTLAQATKRGYAADLKIFFSLGSEAHQTAAIPATAETIANFLADQASGILSVWLRQESQLINGRPVSVATLRRRLAAIKYAHKLNKIEPSPTDTAEVRETLKGIRRTLGAKPNAKSALMSQDIQLLIKYIPETITGQRDRAILLLGFAGALRRSELTSLELSDIEVQENGMLVYIRSSKTDQEQQGQVIGIARSENKANCPVGAIEQWLQSSMILSGPIFRRIFANGKIAITTLSDRTIYNIVKNYCQLAGLDASRFGAHSLRRGFVTSAAKAKVDPFRIMAVTRHKRLETVKRYVDEANLISDYPGADLLK

SEQ ID NO: 1329 - protein, 311 aa, Methylobacterium radiotolerans
MTLPATLAARARAFADEALSENSRRAYRADWQHYADWCRTHDLEPLPAGPEQVASYLTSMAETHKRATIERRLVTIGQAHKLQGLPWVPAHPAVRAALRGMFRRYGRPKKQAAALGVPETLQIVAACEGTVAALRDRALFLMSFAGAFRRSEIARIRFEDVAFREGAVDVFLPQSKGDQEGEGTIVTVLAGENVATCPVAALRRWLKAAPTENHIFRAVRADGTVMEAGLHPDSIGRIVQKRAAEAGLVAGPRERISAHGFRAGFITEAYKRGSRDEEIMSHSRHRDLKTMRGYVRRAKLSDAHPGRNLGL

SEQ ID NO: 1330 - protein, 353 aa, Methylobacterium radiotolerans
MELDAADPAPGPSRDSFAAPVPFADALPPGLELLIERLEQHARAARGAFADNTLRALAADSRIFAAWCREAGRAMLPATPETVAAFIDAQAETKARATVERYRSSVAALHRAAGLQNPCADEIVRLAVKRMNRAKGRRQKQAEPLNRTSIARMLEVKTPGRLHRRVTEAKREVPLIALRNAALVAVAYDTLLRRSELVSLYIGDLQKGADGSGTVLVRRSKADQEGEGAIKYLAPDTVEHIDAWLAAAQLTSGPLFRPLTKGGQVGAGALGAGEVARVFREVATAAGLKLARLPSGHSTRVGATQDMFAAGFELLEVMQAGSWKTPAMPARYGERLRAQRGAARKLATLQNRA

SEQ ID NO: 1331 - protein, 311 aa, Methylobacterium radiotolerans
MTLPATLAARARAFADEALSENSRRAYRADWQHYADWCRTHDLEPLPAGPEQVASYLTSMAETHKRATIERRLVTIGQAHKLQGLPWIPAHPAVRAALRGMFRRYGRPKKQAAALGVPETLQIVAACEGTVAALRDRALFLMSFAGAFRRSEIARIRFEDVAFREGAVDVFLPQSKGDQEGEGTIVTVLAGENVATCPVAALRRWLKAAPTENHIFRAVRADGTVMEAGLHPDSIGRIVQKRAAEAGLVAGPRERISAHGFRAGFITEAYRRGSRDEEIMSHSRHRDLKTMRGYVRRAKLSDAHPGRKLGL

SEQ ID NO: 1332 - protein, 311 aa, Methylobacterium organophilum
MTLPATLAARARAFADEALSENSRRAYRADWQHYADWCRTHDLKPLPAGPEQVASYLTSMAETHKRATIERRLVTIGQAHKLQGLPWIPAHPAVRAALRGMFRRYGRPKKQAAALGVPETLQIVAACEGTVAALRDRALFLMSFAGAFRRSEIARIRFEDVAFREGAVDVFLPQSKGDQEGEGTIVTVLAGENVATCPVAALQRWLKAAPTENHIFRAVRADGTVMEAGLHPDSIGRIVQKRAAEAGLVAGPRERISAHGFRAGFITEAYKRGSRDEEIMSHSRHRDLKTMRGYVRRAKLSDAHPGRNLGL

SEQ ID NO: 1333 - protein, 311 aa, Methylobacterium radiotolerans
MTLPATLAARARAFADEALSENSRRAYRADWQHYADWCRTHDLEPLPAGPEQVASYLTSMAETHKRATIERRLVTIGQAHKLQGLPWIPAHPAVRAALRGMFRRYGRPKKQAAALGVPETLQIVAACEGTVAALRDRALFLMSFAGAFRRSEIARIRFEDVAFREGAVDVFLPQSKGDQEGEGTIVTVLAGENVATCPVAALRRWLKAAPTENHIFRAVRADGTVMEAGLHPDSIGRIVQKRAAEAGLVAGPRERISAHGFRAGFITEAYRRGSRDEEIMSHSRHRDLKTMRGYVRRAKLSDAHPGRNLGL

SEQ ID NO: 1334 - protein, 296 aa, Bacillus pumilus
MNDQLSDFIHFMTVERGLSENTIVSYKRDLQNYLSFLMTHEQLSDIKDVTRLHIIHYLKQLKEEGKSSKTSVRHLSSIRSFHQFLLREKVTKDDPSWNIETQKTERKLPKVLSLGEVEKLLDTPNQHTPFDYRDKAMLELLYATGIRVSEMLDLTLADVHLTMGFIRCFGKGRKERIVPIGEAAASAIEEYLEKGRGKLLKKQPADALFLNHHGKKMSRQGFWKNLKKRALEAGIQKELTPHTLRHSFATHLLENGADLRAVQEMLGHADISTTQIYTHVTKTRLKDVYHKFHPRA

SEQ ID NO: 1335 - protein, 321 aa, Bradyrhizobium canariense
MTSVPVLADAVSLPATIAPDLAAAVSYAKAEKAPATRRAYETDFRLFRTYCEEKAASSLPALPETVAAYLAHGVQEGAKASTLGRRLAAIRYAHKLASLPTPTDSEAVKATLRGIRRTIGAAKVKKAPAVASRIKAMVAACPSTIAGKRDRALLLLGFGGAFRRSELVALDVEHIEETSEGLLILIAKSKTDQDAEGVTIAVARGSAETCPVVALRDWLDAAGIDAGPVFRPINKAGVVSAERLTDQSVALIVKAYARRVGLDAGVFSGHSLRRGFLTSSAAAGKSIFRMKDVSRHKSVDTLAGYIQEAELFKEHAGAGLL

SEQ ID NO: 1336 - protein, 252 aa, Unknown
  source: /note="Description of Unknown: Clostridiales sequence"
MEKTGREITQELLSGFCIHLEESGYAKATVNKYKADLMQYILFLEGAPVCEEGLSRYREYLEQQYRTSSANSKIAAVNAFFKSVGWEYLIPALEPGESLPVMGEELTLSEYRQLLKEAKQQGNLRLYYLIQILSSTKINISEHRYVTVEAVSRGYMVIPRGKRSRVIFIPDRLRRQILTYCKKQEIQSGPVFVNWKGTPLDRSNVHKYLKRLSQNAGVDPEKVNPRSLTRVVEFSSAVYMLDEKMAGEVQDP

SEQ ID NO: 1337 - protein, 368 aa, Pseudomonas fluorescens
MDVSNNTNQPISATETRLELTEIASSTQATAEAFIAAGTAANTVRSYRSALAYWEAWLHLRYDRALGDGALPAPVVVQFIVDHLARPTPDGTWHHLLPPNIDLALCQTRVKGKPGPLAFNTVSHRLAVLAKWHKLQHWDNPCAASAVVTLLREAGKAQVRQGVGVRKKTAMTREPLQAMLATCTDGLRGVRDKALLLLAWSGGGRRRSEVVNLQVGDVRKLDDDTWLYTLGATKTDTGGVRREKPLRGPAAQALSAWLAVAPADCGPLFRRMYKGNKVGVAPLSADQVARIVQRRAKLADLEGDWAAHSLRSGFVTEAGRQGVPLGEVMAMTEHRSVATVMGYFQTGSLLSSRATELLPKADSKEQGE

SEQ ID NO: 1338 - protein, 317 aa, Candidatus Pelagibacter sp. TMED142
MNKLTTDLKLLHEETLNNLRSSKANNTLRAYKSDFKDFGIFCAKHGLNALPTEPKIVSLYITYLSKNSKISTLRRRLVSISMVHKLKGHYLDTKNPVIVENLMGIRRVKGSIQKGKKPILIKHLKSIINIINDQKIDEIKKLRDKSIILIGFGGGFRRTELISIDYEDLEFVPEGLKINIKRSKTDQFGEGMIKGLPLFINEVYCPVSNLRKWLEVSKIKSGPIFTRFSKGLSLTNKRLTDQSVVLLIKEYLKLAGIENTNFAGHSLRSGFATVAAESGADERSIMAMTGHKTTQMVRRYIKEANIFKNNALNKVKI

SEQ ID NO: 1339 - protein, 317 aa, Candidatus Pelagibacter ubique
MNELTTELKSLHEATLNNLKSSKANNTLRAYKSDFKDFGIFCAKHGLKTLPSEPKIVSLYLTHLSKNSKISTLRRRLVSISMVHKLKGHYLDTKHPIIVENLMGIRRVKGSIQKGKKPILISHLKSIINVIDEQKIENIKKFRDKSLILIGFGGGFRRTELISIDHEDLEFVPEGLKITIRKSKTDQLGEGMIKGLPYFTNETYCPIVNLKKWLEISKIKSGPIFRRFSKGLSLTDKRLTDQSVVLLMKEYLKLAGIENKNFAGHSLRSGFATVAADSGADERSIMAMTGHKSTQMVRRYIREANIFKNNALNKVKI

SEQ ID NO: 1340 - protein, 329 aa, Enterobacter sp. 638
MILMPQDDPALNVIPAGLSPEDDFLPVLAGGELPLSPARAYLLSLNSPRSRQTMASFLNIVAGMLGAASLETCSWGSLRRHHVMGVTELLRDTGRATATVNTYLSALKGVAKEAWMLKLMDVESFQHIRAVRNLRGSRLPRGRALPAEEIGKLFAVCEADATYLGVRDAALLGVILGCGLRRSETVGLSLSDVVTHERALRVLGKGNKERLAYMPAGTWQRLQTWIDQVRGEAAGPLFTRIRRFDTLTNDRLTDQAVYHILQMRQRQAQIERCAPHDLRRTFATAMLDNGEDLITVKDAMGHASVTTTQQYDRRGEERLRQARDRLNLT

SEQ ID NO: 1341 - protein, 404 aa, Sphaerochaeta pleomorpha
MIASAPFTLCKLSKNDRIYWYALFRDPQTGKRTNKKSVEKLRKELGIQSTQPIKRRDEAILICKQALDAGLLFGKKTPTTLFDYLSLFFDWEKSPYVEKRNLLDPGSLSQDYISTRQNLVSNHVLPLIHHNLLLSVVTTRYMEQLQLSLVKKGKLSHATVNICMQAVTMAVREAQRAGLIDASVSIALRPLKCTHRMRGILSEDELSNFMQYLKTSGEKRMYLACLLSLLTGMRSGELRGLHASSISSGLITVEFAYANKAGLKEPKGKKTRLVPCPAFLCEELLLLGRSNPFGNGNDLVFWSRRTGSYVSSHYFSEKLQGALVRSKVLEKQEILDRNITFHSLRHMANTLLRGSVDEHVLRMTIGHSSEQLSDLYTHLSQRGLKSVELAQQNNILPLLGENRE

SEQ ID NO: 1342 - protein, 361 aa, Enterococcus faecium
MKNTEIYQKIDTIILHMPDYIKDFVQDREDKDQSPRTTLEYLKNYKLFYEWLLSESIVPDTSITSIRHLTAYDLNLYKSHLKRRAKENVKKDTTKAKLEDNNNLGLSTSTINRNITALKVLFKYLSKSSNNPLGKPYLEDNPMDQVATITDKTTLAARANAIEKKLFLDEDTQNYLDYIANEYKNTLSKRALIYYHRDVERDLAINALILGSGLRLSEVVNINLDDLSLDKNNVVVTRKGNKRDAVNIAAFAMEYLANYLAIRKERYKVTENEKALFLAIYQGEAKRISGIAIERMVAKYSKGFRVQVSPHKLRHTLATRLYQQTNSLVLTAQQLGHSSTNTTTLYTHIDNAATIDALNSL

SEQ ID NO: 1343 - protein, 322 aa, Chitinilyticum aquatile
MTTLTPQPSFSGVPAELQKSFEAAIGYLRAQLAPATLRAYQSDFRIFCDWCERFKLATTPATPETLALFLSDQADSGVAAVTLERRLASIRYVHQMKELPSPTDHPLVRGTLTGIRRIHGTLPRNQKEPILDHQVFRMLQLTPDTLLGLRDRAIIALGFAGAFRRSELAALDVSDLKFDQAGNLVCLIRRGKTDQGGSGFEKPILNGRRLQPVTHLKAWLSTAGIDEGAVFRRVDWAGAATEQRLSAQWMARVVKNYANQIGLGFTEFGAHSLRSGFITSAGERDVQLYKIMEVTGQKDPRTVLRYLRRANLFKDHAGEDFL

SEQ ID NO: 1344 - protein, 297 aa, Bacillus sp.
MLDRLKDFIHFMVVEKGLSKNTIVSYERDLKSYLTYMVKVEQIQSLNEITRIHIVHFLHHLKQQGKSAKTLARHVASIRSFHQFLLREKVTENDPSVHIETPQTERSLPKVLSLTEVEALLDAPSEKGPLPLRDKAMLELLYATGIRVSELINLNLDDLHLTMGFVRCIGKGNKERIIPIGKTATVVLEEYIKDGRPKLSSKQRQTEALFLNHHGNRLTRQGFWKILKGLAKKANIEKELTPHTLRHSFATHLLENGADLRAVQEMLGHADISTTQIYTHVTKTRLKDVYAKHHPRA

SEQ ID NO: 1345 - protein, 353 aa, Roseburia hominis
MKLPNSYGSVIKLGGKRRKPYAVRISKLVEDDTGKVKRKYTYLAYFSKPEMAYTYLAEYNSGAVVPEHMKYSDSPTFAEMYEKWKKYRKSLKNQISDSTWRNYEIAFHHFSELHDRKFISIRTNDLQQCLNAYNHKSQTTISSMRAVLKAMYQYAKLNEYIDRDLTEGLVYEWTNSTEQIHDRYSDEEIKTLWSKLYEINNVDIILIMIYTGLRPTELLEIQTENVHLDEKYMVGGMKTEAGKDRIIPLNDKIIPLVKNRYDPNKKYLINNKFGNHYTYGTYMNGNFNTCMGKLKMKHLPHDGRHTFASLMDSAGANDVCIKLIMGHSMKNDTTKGTYTHKTLEELLTEVNKI

SEQ ID NO: 1346 - protein, 440 aa, Afipia sp. P52-10
MATEKITKRIVDALKAPKPSRDGVKVREHFVWDRELRGFGVQVMPSGLKSFVIQYRTPEGRNRRAVIGRYGLMTVEEARKLAHEKLVAVSKGVDPVAEEAKAAGLLTVAEVCDWYLAEAEAGRILGRRRRPIKPSTLAMDRSRIEAHIKPLLGRRQVASLKLGDVEGAQADIAAGKTSKPRAGSRGGATTGGDGVAARTMSTLHSIFEHAVRLGKIEANPAKGVRRLASAPRERRLSRSEIERLGKTLRAAAQEGEHPTGLAAIRFLLLTGFRRMEALGLQRTWLDEEECAIRFPDTKSGAQIRVIGQAAIDLLLDQPKTKSPFFFPADWGEGHFIGVVRVLDRVCQKAGLADITPHTLRHTYASLAGDLGFSELTIAALLGHSARGVTQRYVHIDEALRMTADQVADEMADLLDGRATPSRSRSSRRGRSERKLEATGA

SEQ ID NO: 1347 - protein, 257 aa, Simiduia agarivorans
MAKSGQARVPTAEQQQHLFQVIQEHRHPEKNTAIMQISFKLGLRAQEIALLQIKEVAKLNSLGSGFKLLEVMSLPAAYTKGADAMNRSKTVYQRRTVSFDVETFNKIIKQVEILAKSGAAVNPEDFYPPLKKHKGKSRDLPMVDGSLREALTNYIQMRIAKGEVLKPSSPLFITQKGGSYSPNTLQEHMALMLRDWAGIEKASSHSGRRALITHIIHKQRKSVKIAQKIAGHVNPSTTLIYEDPPEAVLEDALNDLN

SEQ ID NO: 1348 - protein, 326 aa, Hymenobacter perfusus
MENSSLLPVVVPTRSHSLVELPPSVARYVEAGLHGAENTKRGYAADLRSFQDYCEHHQVLHLPAEVTTVAGYVSQMADRGMKLATIRRHVAAIAKLHQLAGQPSPTGHEALQVVLDGIARLVGKRQRQAPAFTVAELKQSIRAMDVTTPTGLRDRALLLLGFAGAFRRSELVALNVEDVELTRQALVIHLRQSKTNQYGLEEDKAVFYSPSADFCPVRAVQEWIESLGRTSGPLFTRMSRGTQVRPAQPGQHRLTDQSVNDLVQRHLGISYSAHSLRASFVTIAVEAGQSNKAIKNQTKQKTDAMIERYARLDDVKRFNAAQYLGL

SEQ ID NO: 1349 - protein, 326 aa, Hymenobacter sp. UV11
MENPSSLPVIVPTRSHSLVEMPASVGRYVEAGLQGAANTKRGYAADLRSFEDYCQHHQLSYLPADVSTVAGYVSQLADRGKKYATIRRHVAAIAKLHQLAGQPSPTSHEALGVVLDGVARVHGKRQRQAPAFTVAELKQAIRALDLSTPTGLRDRALLLLGFAGAFRRSELVALNVEDVELTRLALVIHLRRSKTNQYGEEEDKAVFYAPSADYCPVRAVQDWLAVLARPAGPLFTRMSRGTSRRPAQPGTARLSDQSVNDLVQRHLGSSYTAHSLRASFVTVAVEAGQSNKAIKNQTKQKTDAMIERYARLDDVKRFNAAQYLGL

SEQ ID NO: 1350 - protein, 306 aa, Hymenobacter sp. UV11
MPASVGRYVEAGLQGAANTKRGYAADLRSFEDYCQHHQLSYLPADVSTVAGYVSQLADRGKKYATIRRHVAAIAKLHQLAGQPSPTSHEALGVVLDGVARVHGKRQRQAPAFTVAELKQAIRALDLSTPTGLRDRALLLLGFAGAFRRSELVALNVEDVELTRLALVIHLRRSKTNQYGEEEDKAVFYAPSADYCPVRAVQDWLAVLARPAGPLFTRMSRGTSRRPAQPGTARLSDQSVNDLVQRHLGSSYTAHSLRASFVTVAVEAGQSNKAIKNQTKQKTDAMIERYARLDDVKRFNAAQYLGL

SEQ ID NO: 1351 - protein, 305 aa, Candidatus Pelagibacter sp. TMED203
MKSLVTDLKSLELETLKNLKNSKADNTLRAYESDFKDFAAFCKSNGFSSLPTEPRILALYLTHLSVNSKYSTLKRRLASISVIHRLKGHYIDTKHPLIIENLLGIKRRKGSSQKSKKPILISDLKLIIKAIDQSELKYLKKLRNKALILTGFSGGFRRSELVAIEHEDIEFVSEGVKIYVKRSKTDQSGEGMIKAIPYFDNEDFCPVTNLKNWISQGNIQNGKIFNISDKNVVLIIKKFAGLAGLDQNKYAGHSLRSGFATSTAESGAEERSIMSMTGHKTTQMVRRYIKEANLFKNNALNKIKL

SEQ ID NO: 1352 - protein, 300 aa, Providencia sneebia
METKQINPLIEHFLDTIWLEQDLAENTLASYRIDLQLLDKWLEANELNLENVQSIDLQSFLAERIESGYKAASSARLLSSIRRLFQYFYREKIRLDDPSAVIAAPKIPQRLPKDLSEQQVEDLLNAPATEDPLELRDKAMLEVLYACGLRVSELVGLTFSDISLRQGVIRVVGKGDKERLVPLGEEAIYWIEKYIQEGRPDLLKGKASDVLFPSKRGTKMTRQTFWHRIKHYAVIANIDSESLSPHVLRHAFATHLLNHGADLRVVQMLLGHSDLSTTQIYTHVATERLRTLHEQHHPRG

SEQ ID NO: 1353 - protein, 322 aa, Vibrio cyclitrophicus
MRKTVPILTDFVTINSFVEKLNSKATIEIIDELTGHQYSHNSLLGIYSDWNRYHAFCTKHRINTLPASITAVRRFLETESNDRKYASLKRYTATLSLLHTVLNFANPIKHRQVRFTLLHLQAQMAGDAKQTNAMTSAHLTELNMLLSHQKANLKEVRDIAIYNVMFECALKRSELKALKMNDIESYDEGYQITIKDSAYKLSQVASVALQRWLSFTGSEDELPMFRAIDKHENIRLQPLDDSSIYRILRRASDILGLADNHHFSGNSIRVGAAQELSKQGLKVREIQDFGRWLSPAMPAQYVGYTGTAESEKMKFKAIVPWQ

SEQ ID NO: 1354 - protein, 345 aa, Vibrio sp.
MSIRNLKDGSTKPWLCECYPNGRTGKRVRKKFTTKGEAKAFELHTMKEIDDKPWMGSKTDHRRMSELLDTWWTIHGHTLKSGKQARELIAKTIEELGNPIASHLKERDYLDYRAARIPYRGKNKSIKISPTTHNTELIYLKGMFKKLIKYNQWKYPNPLEAIETIKTSEKNLAYLTKPQIEEFLVNLKNFNRVITVSIPQLIVISKICLATGARISEALTLTRSQVAEFKLTYTETKGKRNRSVPISPALYQEILDIAVSDHEIFNTSYKDAWRYIKKALPEHVPSGQATHVLRHTFASHFMMNKGDILVLQRILGHTKIEQTMAYSHFAPEHLIQAVHLNPLEN

SEQ ID NO: 1355 - protein, 345 aa, Streptomyces natalensis
MTEIEHYTPAAPPAVRQLSPEAQAALAAGRADSTRRAYAEDRSAYLAWCAERGEQPLPASQDLLVEYVTHLTLTPRPRTGRPSAPSSLERMLSAITTMHAELDLPKPVTKGARTVIAGYKHKLALDKKPGGKQRQVKPALPPALRKMLDALDRDTLIGKRDAAMLLLGYSAATRSSELVGLDIGEPVECDEGYLVSIYRVKMKKFTESAIPYGKNPATCPVRALRSLIAAMREAGRTEGPLFVRIDRHGRIAPPMVRHGKPIGDPSGRLTADAASDVIERLAEAAGFMGRWRGHSLRRGFATAAQRGGAPMVRVARQGGWADNSTSLARYFDEGDPWEDNPVTGL

SEQ ID NO: 1356 - protein, 358 aa, Mycolicibacterium chlorophenolicum
MPRSDSQPESPVVAYPGWFTDFLDDRVIRKPSPHTTKAYRQDFEAIATLVAGQAEDVVNLEAAALDKDTLRAAFAVYARTHSAASIRRCWSTWNTLCTYLFTAELLGANPMPLIGRPKVPKSLPKSYSDNTVTGLVTAIDADTGSARDSDWPERDRAIVFTALLAGPRAEELIRADIGDVRRTDDGGGVLHVRGKGNKDRRIPFGKELLDVIEQYLESRVVRFPPARRRVPDSDTLSRFSSNAPLFVGVDGERITRGTLQYRILRAFKRAGINSERPAGALVHGLRHTFATELANAHVSVYTLMKLLGHESMVTSQRYVDGAGTETRSATDKNPLYRFLSPRTEYSNQPVDSRGVQGS

SEQ ID NO: 1357 - protein, 351 aa, Ruegeria sp. AU67
MSTHAPYLPAASPALSVEDQEALTDLYVRGTPANTLRAYERDLLYVTAWKTARFDLALRWPESEATALAFILDHARDLSDAPSDDHSRQVAEVLIAQGLRKSLACPAPSTLDRRIASWLAFHRMKNLESPFGSPQVNQARSKARRAAARPPTPKSAHPITRDILELLLATCRGSRRDCRDRAILILGWASGGRRRSEITGLMFEDVSLKEFGEKSLVWISLLETKTTAKGKTPPLVLKGRAALALVHWIEVGQIKNGPLFRPVSKADRVLKRRLSPDGIYQIVKHRLRLAGLPEDFASPHGLRSGFLTQAALDGAPIQTAMRLSLHRSMAQAQKYYDDVDVAENPATDLLG

SEQ ID NO: 1358 - protein, 345 aa, Vibrio splendidus
MSIRNLKDGSTKPWLCECYPNGRTGKRVRKKFTTRGEAKAFELHTMKEIDDKPWMGSKPDHRRMSELLDAWWTIHGHTLKSGKQARELIAKTIEELGNPIASHLKERDYLDYRAARIPYRGKNKSIKISPTTHNTELIYLKGMFKKLIKYNQWKYPNPLEAIETIKTSEKNLAYLTKPQIEEFLVNLKNFNRVITVSIPQLIVISKICLATGARISEALTLTRSQVAEFKLTYTETKGKRNRSVPISPALYQEILDIAVSDHEIFNTSYKDAWRYIKRALPEHVPSGQATHVLRHTFASHFMMNKGDILVLQRILGHTKIEQTMTYSHFAPEHLIQAVHLNPLEN

SEQ ID NO: 1359 - protein, 266 aa, Vibrio campbellii
MSTVQAISDKRVVKKAEKYLKRHHDEVYWLIWRIGIETGLRITDITKLSYDNINFESGEVTVIESKGTLARQARARHKVLKSVKNELLNYYKRDHAKLLSVYVCDYRNIVDLVPRSWKHSIEVRLEEATKSAPVKKRVAYLSSRTLTALKKRRKLWLGKDSGLIFSRATLASNRAKRQRGVISRQACWRVFSCLSCCIDELRQHKIGCHSLRKIFARHLYHSSDMDIGLVATIIGHQSVSTTLRYIGISDEDTKRAQLRLFDYFFA

SEQ ID NO: 1360 - protein, 345 aa, Vibrio azureus
MSIRNLKDGSKKPWLCECYPYGRTGKRVRKRFTTKGEAKAFELHTMKEIDDKPWMGIKPDNRRMSELLETWWTIHGHTLKSGKQARDLISKTIEELGNPIACQFKERDYLAYRAARIPYRGKNKSIEISPTTHNLELIYLKGMFKKLIKYNQWKYPNPLEAIEPIKTSEKHLAYLTKPQIEEFFDNLQNCNRVIKASIPQIIVIAKICLATGARISEALTLTRTQITELKLTYTDTKGKRNRSVPISPSLYQEILDIAVSDHDIFNTSYKDAWRYIKRALPEHVPNGQATHVLRHTFASHFMMNKGDILVLQRILGHTKIEQTMAYSHFAPEHLIQAVHLNPLEN

SEQ ID NO: 1361 - protein, 345 aa, Vibrio campbellii
MSVRNLKDGSTKPWICECYPNGRAGKRVRKKFATKGEAKAFELHTMKEIDDKPWMGIKPDNRRMSELLENWWTIHGHTLKSGKQAKDLISKTIEELGNPIACQFKERDYLAYRAARTPYRGKNKSIEISPTTHNLELIYLKGMFKKLIKYNQWKYPNPLEAIEPIKTSEKHLAYLTKPQIDEFFDELQNCKRVIKASIPQIIVIAKICLATGARISEALTLTRTQITEFKLTYTDTKGKRNRSVPISPSLYQEILDIAVSDHDIFNTSYKDAWRYIKRALPEHVPNGQATHVLRHTFASHFMMNKGDILVLQRILGHTKIEQTMAYSHFAPEHLMQAVHLNPLEN

SEQ ID NO: 1362 - protein, 345 aa, Vibrio sp. J2-4
MSVRNLKDGSTKPWICECYPNGRTGKRVRKKFATKGEAKAFELHTMKEIDDKPWMGIKPDHRRMSELLDTWWNIHGHTLKSGKQARDLIAKTIEELGNPIACQFKERDYLAYRAARIPYRGKNKSIEISPTTHNLELIYLKGMFKKLIKYNQWKHPNPVESIEPIRTSEKNLAYLTKPQIEEFLFNLKNFNRVITVSIPQLIVISKICLATGARISEALTLTRSQVAEFKLTYTETKGKRNRSVPISPALYHEILDIAVNDHKIFDTTYKDAWRYIKRALPNHVPSGQATHVLRHTFASHFMMNKGDILVLQRILGHTKIEQTMAYSHFAPEHLMQAVHLNPLEN

SEQ ID NO: 1363 - protein, 376 aa, Delftia acidovorans
MIPQDQPLEDTKQGSTLPSAGLEPAAQQAVRELLREGESTNTRNSYQSAMRYWAAWHALRFERQMQLPLDVPCVLQFIIDHALRQTGAGLASEMPAHMDRALVEAGYKAREGPLSHNTLVHRMAVLSKAHQVHGLANPCQDGAVRELMSRTRKAYARRGEQPAKKDALTRDLLEQLLQTCDDSLRGRRDRALLLFAWSSGGRRRSEVAGADMRHLRAVGPQEFIYTLAHSKTNQSGRDAPENHKPVTGRAAQALADWLRAAAIQEGPIFRRIRKGGHVGEPLSPAAVRDIVKQRCALAGVEGDFSAHSLRSGFVTEAGRQNVPLPDTMALTGHSSVNTVLGYFRADSALSNRAARLLDAGDDDAAAAAQGSGRPQS

SEQ ID NO: 1364 - protein, 351 aa, Delftia sp. JD2
MGTITTRKRADGSQSYTAQIRLKEGGQIIYSEAQTFSRKVLASEWLRRREYELEQERASGQALHKKVSVGELLRDYVSAAENVTEWGRSKKADIARVQASGLADLQATKLTVQDLMGYAKKRRTEDEAGPATVLNDMVWLRQVFLHASAARGIDAPLQVLDRAKSELLRTRVIAKPAQRSRRLLPEEEAKLLEHFSSRDGRASIPMSDIMQFALLTARRQEEICRLRWVDVDFEKGVAWLDDVKHPRMKKGNRRCFRVLNAAADIIKSQSREEGVEFVFPYNNRSVGAAFTRACHVLGIEDLHFHDLRHEATSRLFEKGYSIQEVAQFTLHESWATLKRYTHLRPENVQER

SEQ ID NO: 1365 - protein, 372 aa, Bacillus loiseleuriae
MNDLTNFNHLTSEQYLTQLQNKLEHRHLLDEHRNLSLSDSSEQDFLELFFSEKVFTPDKEFSPHTIRAYRSDAKTLLQFLMEHSLSFRNIGFPEVKVYNKYIKEKYAPKSAIRKLEFFRRLLDFGYETQFYKAHLSTWISKPTSKKGHYIIEETRLEAEQTRVQVRELNQKDAEYLISCFPKIVKANTNREQLEKRNLLIGYLLYTTGLRASELVSLNWGSFRYNRQGHLYADVIGKGKKPRSIPVKDETIELLFDYRKSLGESVEINPEDVNPLFFALYNKKEPCEHKKRLTYPSLYKIVKEAVHLAGKNSKVSPHWFRHTFVTMLLENDVPLAVVKDWAGHSDISTTNIYLERVNQDNTHVYLNKVNVFK

SEQ ID NO: 1366 - protein, 430 aa, Unknown
  source: /note="Description of Unknown: Orbaceae sequence"
MAVLTDYKINASKSKAKEYTLKDGNGLFLNIHPNGSKYWLFRFSWNGKQTRMSFGTYPTVDIKQARYLCEQANFKLLSGIDPRLKENPTIDPVDEVLDEEPKCTFAQFAQHWLEFKMKKLNAKPSKDKKNNGRGSTEIQIRRAFTNDIFPVLKDKSIHKVTRNDLLCIIRKVEKRGALSVAEKIRSWLDEIFRYAVVTEGLEINPAADLDIASLPYRRNNRYPFIDVSELPELLVKLSTYQGSRLTILGLRLLLLTGVRTGELRFSEAWQFDLKNALWRIPASDVKQLQQVIEKVDNRVPDYIVPLSRQALDIVKELLSYHMRGQRYLIANRTNPLEAMSENTLNQALKNMGFKRRLCTHGIRHTISTALNDLKYDKDFIEAQLSHSDTNKVRATYNHAQYIEPRREMMQEWADLLDKWEQEVLDKINNK

SEQ ID NO: 1367 - protein, 365 aa, Thioclava dalianensis
MSENNEKSSSSAPNGSSVNEDNERDHRDGDALSLPSFVAGSGTLDRLVDTARDYARAAASDKTLKAYAKDWAHFARWCRMKGAEPLPPSPEMIGLYLADLASGSGLSPALSVSTIERRLSGLGWNYAQRGFTLDRKNRHIATVLAGIKRKHARPPVQKEAILAEDILAMVATLAFDLRGLRDRAILLLGYAGGLRRSEIVSLDVHKDDTPDSGGWIEIFDKGALLTLNAKTGWREVEIGRGSKDQTCPVHALEQWLHFAKIDFGPIFVGTSRDGKRALETRLNDKHVARLIKRTVLDAGIRSDLPEKDRLALFSGHSLRAGLASSAEVDERYVQKQLGHASAEMTRRYQRRRDRFRVNLTKAAGL

SEQ ID NO: 1368 - protein, 352 aa, Marvinbryantia formatexigens
MDKNQLTYHEQVKVDNTLRMREILKTMPGFARDYFRAIEPTTSTRTRISYAYDIRVFFQFLLEENPSLRGKEMTDITLDILDKIKPVDIEEYLEYLKVYQSEDGLKTNGERALKRKMVALRGFYAYYFKREMIKTNPTLLVDMPKIHDKAIVRLDTDETASLLDYIEHAGDSLSGQKKVYWEKTKRRDLALVTLLLGTGIRVSECVGLDIGDVDFKNNGIKVVRKGGNEMVVYFGDEVEKALRDYLEERCGITPVAGSENALFLSTQRKRIGVQAVENLVKKYARQITTTKKITPHKLRSTYGTSLYQETNDIYLVADVLGHKDVNTTKKHYAAMDDQRRRSAASAVHLREP

SEQ ID NO: 1369 - protein, 308 aa, Unknown
  source: /note="Description of Unknown: Unclassified Pseudomonas sequence"
MSELDRYLNAATRDNTRRSYRAAIEHFEVNWGGFLPATSDSVARYLVAHAGVLSVNTLKLRLSALAQWHTSQGFPDPTKAPVVRKVLKGIRALHPAQEKQAEPLQLQHLEQVIQFLEQEGHDARGAEDHPRWLRAKRDAALILLGFWRGFRSDELCRLNIEHVQAVPGSGITLYLPRSKSDRENIGRTYQTPALLRLCPVQAYSEWLSASALVRGPVFRGIDRWGNLGEEGLHANSVIPLLRQALERAGIAADQYTSHSLRRGFATWAHRSGWDLKSLMTYVGWKDMKSAMRYVEATPFLGMTRASLE

SEQ ID NO: 1370 - protein, 308 aa, Pseudomonas fluorescens
MSELDRYLNAATRDNTRRSYRAAIEHFEVNWGGFLPATSDSVARYLVAHAGVLSVNTLKLRLSALAQWHTSQGFPDPTKAPVVRKVLKGIRALHPAQEKQAEPLQLQHLEQVIQFLEQEGHDARGAEDHPRWLRAKRDAALILLGFWRGFRSDELCRLNIEHVQAVPDSGITLYLPRSKSDRENIGRTYQTPALLRLCPVQAYSEWLSASALVRGPVFRGIDRWGNLGEEGLHANSVIPLLRQALERAGIAADQYTSHSLRRGFATWAHRSGWDLKSLMTYVGWKDMKSAMRYVEATPFLGMTRASLE

SEQ ID NO: 1371 - protein, 308 aa, Unknown
  source: /note="Description of Unknown: Unclassified Pseudomonas sequence"
MSELDRYLNAATRDNTRRSYRAAIEHFEANWGGFLPATSDSVARYLVAHAGVLSVNTLKLRLSALAQWHTSQGFPDPTKAPVVRKVLKGIRALHPAQEKQAEPLQLQHLEQVIQFLEQEGHDARRAEDHPRWLRAKRDAALILLGFWRGFRSDELCRLNIEHVQAVPGSGITLYLPRSKSDRENIGRTYQTPALLRLCPVQAYSEWLSASALVRGPVFRGIDRWGNLGEEGLHANSVIPLLRQALERAGIAADQYTSHSLRRGFATWAHRSGWDLKSLMTYVGWKDMKSAMRYVEATPFLGMTRASLE

SEQ ID NO: 1372 - protein, 308 aa, Unknown
  source: /note="Description of Unknown: Unclassified Pseudomonas sequence"
MSELDRYLNAATRDNTRRSYRAAIEHFEVNWGGFLPATSDSVARYLVAHAGVLSVNTLKLRLSALAQWHTSQGFPDPTKAPVVRKVLKGIRALHPAQEKQAEPLQLQHLEQVIQFLEQEGHDARRAEDHPRWLRAKRDAALILLGFWRGFRSDELCRLNIEHVQAVPGSGITLYLPRSKSDRENIGRTYQTPALLRLCPVQAYSEWLSASALVRGPVFRGIDRWGNLGEEGLHANSVIPLLRQALERAGIAADQYTSHSLRRGFATWAHRSGWDLKSLMTYVGWKDMKSAMRYVEATPFLGMTRASLE

SEQ ID NO: 1373 - protein, 357 aa, Streptococcus salivarius
MKQETLMKNINGLLEIMPWYVKEYYQAKLVIPYSYKTLYEYLKEYRRFFEWLIRDHEKLGKTARYADYDTIADVHIDELAHLPKSIIEAYFVYLRENTERRSISEVSIVRTKDALSSLFKYLTQETEDDEGEPYFYRNVMVKVKIKKPKDTLASRADNMKEKLFLNDTQSFLDYIDNEHEKKISKRAQVSFVKNKERDLAVIALLLSTGVRLSELVNLDMQDVNLATRTITVIRKGGKKDVVNIAPFGIPYIERYLEIRKGRYAASDSDKAFFLTTQNKVPARLGTRSVELLVKKLSTAYGKPTTPHKLRHTLATRLYEQTKDSLLVSQQLGHKGTAMVEVYAHVAAETTKEALSDL

SEQ ID NO: 1374 - protein, 327 aa, Streptococcus salivarius
MSKQKDKYLALKRQLPDIIDEYISYLQVDVEEPSPKMVERLSVIQKFLNSYAITIDKEGASLSLTDLEKLPREFVQNYLANLRLKPAGKRFILYTLAAFWNYLTNTSFTIERGMPLFYRNVFNEWKIVYKESYHNIIYSESKKKTILYTQEELEGLLDFMANSYVTTLPTQKKADNWEKEKERNIAIFAIIIGTGASTQEVVNLTVRDIDMRKKGIWVVRNNEKQFIRFLPFTIPYIAPFVKERRGRWDLDPSIPPLFLTMLKKPMGRNTIGHLAKNIGHAYGKVITPSILKDSHASIVYKETGDIKKVAEIQGYSLDKNHLIRFID

SEQ ID NO: 1375 - protein, 327 aa, Streptococcus sp. HMSC072D03
MSKQKDKYLALRRQLPDIIDEYISYLQVDVEESSPKMVERLSVIQKFLNSYAITIDKEGASLSLTDLEKLPREFVQNYLANLRLKPAGKRFILYTLAAFWSFLTNTSFTVERGMPLFYRNVFDEWKIVYKESYHNIIYSESKKNTILYTQQELESLLDFMANSYVTTLPTQKKADNWEKEKERNIAIFAIIIGTGASTQEVVNLTVRDIDMRKKGIWVVRNNEKQFIRFLPFTIPYIAPFVKERRGRWDLDPSIPSLFLTMLKKPMGRNTIGHLAKNIGHAYGKAIAPSILKDSHASIVYKETGDIKKVAEIQGYSLDKNHLIRFID

SEQ ID NO: 1376 - protein, 369 aa, Deinococcus geothermalis
MSVQPGTALQLASKWSRPENRRREGLRAAHTQDADTLIDLLNTYIRLKSSRKGRTSALTLKAYAESVRQFLAFTGPPESPSRALNQLSAEDFEVWLLHLQEAGLKPNTIKRHLYGVRNLMKALVWANVLKADPSAGVSPPTDPTPAHAKKRALTQAQMRALLALPGELHPEDSVQASRDALLLALGGTLGLRAAEIVGLDLADVDLATGTLTVRGKGGKTRVVPLPAGVKALLQRWLPARQTVNPKVPALLVSLSSLNRGGRLSTDGARFIAHAYYRQLGLPPEMWGLHTLRRTAGTHLYRATRDLHVVADLLGHASVTTSAIYAKMDADVRREAVEALERLQQEGSAAVQPSRIEQQEDAQQQGGQVA

SEQ ID NO: 1377 - protein, 407 aa, Unknown
  source: /note="Description of Unknown: Bacteroidales sequence"
MNQEDVRVSFYLKKSEADEQGECPIMGRLNVGKYSEAAFSMKMTAPESAWLSGRATGKSARSREINRQLDEIRASALSIYQDLFALREKVSAEEVKCILLGMAYGQETLVAFFLSFIKKFEKKVGINREESTATSYKYACGQLMQFLNKEYNLSDIPFTALDRSFIDKYDLYLRTDCQLSAGTILLLTTQLMTVIRKAKSAGILTSNPFAGYEAERPAREIKYLTEHELERIMSTPLHNRKLYHIRDLFLFSCFTGIPYGDMCRLSDEDLVAVEDGTLWIKTSRKKTKISYEVPLLDIPLYILEKYRDAAPEGKLLPMYSNSELNNALKTIADLCGIKQRLVFHQARHTSATTVLLSNGVPLETVSKILGHERISTTQIYAHVTDDKVENDTRMLDAKIAERFSVAI

SEQ ID NO: 1378 - protein, 342 aa, Aeromonas cavernicola
MTYPDISGSAYSSLQTVFDAQLNSRARRFLRSAKADSTLNAYQADTRIFVFWCQLHGVEPLQASHHHIMNFLADQADGVLADWVWLDKAEGKGELRHGEPRKPATLVRRLAGIRYAFKQKGIHPMPTEHPDIKEMMRGIVRLGDNHKRKTGALTLEPLAKVLDGIDTHDLAGLRDHTLLLLMFSGALRRSEAARIEVSDLDFVGQGIRLRLKPSKHQLHETEIALIPGKHYCPVLALNNWLKKSRINSGPLFRRMNRWGQITPDPLGPQGINLMIKRRTGHSIDYLYVSGHSLRRGFITSAVTAGKPMNKIIEVTRHKDMRTLQEYFDDAHKFADHALDGLL

SEQ ID NO: 1379 - protein, 342 aa, Aeromonas veronii
MAYPSLSNPAHQSLQTVFDAQLNSRARRFLRSAKADSTLNAYQADTRIFVFWCQLHGLDPLQTTHHDIMNFLADQADGVLADWIWLDKEEGKGELRNGEPRKPATLVRRLAGIRYAFKQKGIHPMPTEHPEIKEMMRGIVRLGDNRKHKTGALTLQPLTQVLDGIDTGDLAGLRDHTLLLLMFSGALRRSEAARIEVSDLDFVGQGIRLRLKPSKHQLHETEIALIPGKQYCPVSALQKWLHKSRISEGPLFRRMNRWGQLMAEPLGPQGINLMIKRRTGQTIDDLYVSGHSLRRGFITSAVTAGKPMNKIIEVTRHKDMRTLQEYFDDAHKFSDHALDGLL

SEQ ID NO: 1380 - protein, 342 aa, Aeromonas veronii
MAYPSLSNPAHQSLQTVFDAQLNSRARRFLRSAKADSTLNAYQADTRIFVFWCQLHGLDPLQTTHHDIMNFLADQADGVLADWVWLDKEEGKGELRNGEPRKPATLVRRLAGIRYAFKQKGIHPMPTEHPEIKEMMRGIVRLGDNRKRKTGALTLQPLTQVLDGIDTGDLAGLRDHTLLLLMFSGALRRSEAARIEVSDLDFMGQGIRLRLKPSKHQLHETEIALIPGKHYCPVSALQKWLHKSRISEGPLFRRMNRWGQLMAEPLGPQGINLMIKRRTGQTIDDLYVSGHSLRRGFITSAVTAGKPMNKIIEVTRHKDMRTLQEYFDDAHKFSDHALDGLL

SEQ ID NO: 1381 - protein, 342 aa, Aeromonas veronii
MAYPTLSNPAHQSLQTVFDAQLNSRARRFLRSAKADSTLNAYQADTRIFVFWCQLHGLDPLQTTHHDIMNFLADQADGVLADWVWLDKEEGKGELRNGEPRKPATLVRRLAGIRYAFKQKGIHPMPTEHPEIKEMMRGIVRLGDNRKRKTGALTLQPLTQVLDGIDSGDLAGLRDHTLLLLMFSGALRRSEAARIEVSDLDFVRQGIRLRLKPSKHQLHETEIALIPGKHYCPVSALKKWLHKSRISEGPLFRRMNRWGQLMAEPLGPQGINLMIKRRTGQTIDDLYVSGHSLRRGFITSAVTAGKPMNKIIEVTRHKDMRTLQEYFDDAHKFSDHALDGLL

SEQ ID NO: 1382 - protein, 342 aa, Aeromonas sp. DNP9
MAYPSLSNPAHQSLQTVFDAQLNSRARRFLRSAKADSTLNAYQADTRIFVFWCQLHGLDPLQTTHHDIMNFLADQADGVLADWVWLDKEEGKGELRNGEPRKPATLVRRLAGIRYAFKQKGIHPMPTEHPEIKEMMRGIVRLGDNRKRKTGALTLQPLTQVLDGIDTRDLAGLRDHTLLLLMFSGALRRSEAARIEVSDLDFVGQGIRLRLKPSKHQLHETEIALIPGKHYCPVSALQKWLHKSRISEGPLFRRMNRWGQLMAEPLGPQGINLMIKRRTGQTIDDLYVSGHSLRRGFITSAVTAGKPMNKIIEVTRHKDMRTLQEYFDDAHKFSDHALDGLL

SEQ ID NO: 1383 - protein, 342 aa, Aeromonas veronii
MAYPSLSNPAHQSLQTVFDAQLNSRARRFLRSAKADSTLNAYQADTRIFVFWCQLHGLDPLQTTHHNIMNFLADQADGVLADWVWLDKEEGKGELRNGEPRKPATLVRRLAGIRYAFKQKGIHPMPTEHPEIKEMMRGIVRLGDNRKHKTGALTLQPLTQVLDGIDTGDLAGLRDHTLLLLMFSGALRRSEAARIEVSDLDFVGQGIRLRLKPSKHQLHETEIALIPGKHYCPVSALQKWLHKSRISEGPLFRRMNRWGQLMAEPLGPQGINLMIKRRTGQTIDDLYVSGHSLRRGFITSAVTAGKPMNKIIEVTRHKDMRTLQEYFDDAHKFSDHALDGLL

SEQ ID NO: 1384 - protein, 342 aa, Aeromonas veronii
MAYPTLSNPAHQSLQTVFDAQLNSRARRFLRSAKAVSTLNAYQADTRIFVFWCQLHGLDPLQTTHHDIMNFLADQADGVLAAWVWLDKEEGKGELRNGEPRKPATLVRRLAGIRYAFKQKGIHPMPTEHPEIKEMMRGIVRLGDNRKRKTGALTLQPLTQVLDGIDTGDLAGLRDHTLLLLMFSGALRRSEAARIEVSDLDFVGQGLRLRLKPSKHQLHETEIALIPGKHYCPVSALQKWLHKSRISEGPLFRRMNRWGQLMAEPLGPQGINLMIKRRTGQTIDDLYVSGHSLRRGFITSAVTAGKPMNKIIEVTRHKDMRTLQEYFDDAHKFADHALDGLL

SEQ ID NO: 1385 - protein, 342 aa, Aeromonas veronii
MAYPTLSNPAYQSLQTVFDAQLNSRARRFLRSAKAVSTLNAYQADTRIFVFWCQLHGLDPLQTTHHDIMNFLADQADGVLADWVWLDKEEGKGELRNGEPRKPATLVRRLAGIRYAFKQKGIHPMPTEHPEIKEMMRGIVRLGDNRKRKTGALTLQPLTQVLDGIDTGDLAGLRDHTLLLLMFSGALRRSEAARIEVSDLDFVGQGLRLRLKPSKHQLHETEIALIPGKHYCPVSALQNWLHKSRISEGPLFRRMNRWGQLMAEPLGPQGINLMIKRRTGQTIDDLYVSGHSLRRGFITSAVTAGKPMNKIIEVTRHKDMRTLQEYFDDAHKFSDHALDGLL

SEQ ID NO: 1386 - protein, 342 aa, Aeromonas veronii
MAYPTLSNPAHQSLQTVFDAQLNSRARRFLLSAKADSTLNAYQADTRIFVFWCQLHGLDPLQTTHHDIMNFLADQADGVLADWIWLDKEEGKGELRNGEPRKPATLVRRIAGIRYAFKQKGIHPMPTEHPEIKEMMRGIVRLGDNRKRKTGALTLQPLTQVLDGIDTRDLAGLRDHTLLLLMFSGALRRSEAARIEVSDLDFMGQGIRLRLKPSKHQLHETEIALIPGKHYCPVSALQKWLHKSRISEGPLFRRMNRWGQLMAEPLGPQGINLMIKRRTGQTIDDLYVSGHSLRRGFITSAVTAGKPMNKIIEVTRHKDMRTLQEYFDDAHKFSDHALDGLL

SEQ ID NO: 1387 - protein, 342 aa, Aeromonas veronii
MTYPTLSNPAHQSLQTVFDAQLNSRARRFLRSAKADSTLNAYQADTRIFVFWCQLHGLDPLQTTHHDIMNFLADQADGVLADWVWLDKEEGKGELRNGEPRKPATLVRRLAGIRYAFKQKGIHPLPTEHPEIKEMMRGIVRLGDNRKRKTGALTLQPLTQVLDGIDTSDLAGLRDHTLLLLMFSGALRRSEAARIEVSDLDFVGQGIRLRLKPSKHQLHETEIALIPGKHYCPVSALQKWLHKSRISEGPLFRRMNRWGQLMAEPLGPQGINLMIKRRTGQTIDDLYVSGHSLRRGFITSAVTAGKPMNKIIEVTRHKDMRTLQEYFDDAHKFSDHALDGLL

SEQ ID NO: 1388 - protein, 342 aa, Aeromonas veronii
MAYPSLSNPAHQSLQTVFDAQLNSRARRFLRSAKADSTLNAYQADTRIFVFWCQLHGLDPLQTTHHDIMNFLADQADGVLANWVWLDKEEGKGELRNGEPRKPATLVRRLAGIRYAFKQKGIHPMPTEHPEIKEMMRGIVRLGDNRKRKTGALTLQPLTQVLDGIDTGDLAGLRDHTLLLLMFSGALRRSEAARIEVSDLDFVGQGIRLRLKPSKHQLHETEIALIPGKQYCPVSALQKWLHKSRISEGPLFRRMNRWGQLMAEPLGPQGINLMIKRRTGQTIDDLYVSGHSLRRGFITSAVTAGKPMNKIIEVTRHKDMRTLQEYFDDAHKFSDHALDGLL

SEQ ID NO: 1389 - protein, 342 aa, Aeromonas veronii
MAYPTLSNPAHQSLQTVFDAQLNSRARRFLRSAKADSTLNAYQADTRIFVFWCQLHGLDPLQTTHHDIMNFLADQADGVLADWVWLDKEEGNGELRNGEPRKPATLVRRLAGIRYAFRQKGIHPMPTEHPEIKEMMRGIVRLGDNRKRKTGALTLQPLTQVLDGIDTGDLAGLRDHTLLLLMFSGALRRSEAARIEVSDLDFVGQGLRLRLKPSKHQLHETEIALIPGKHYCPVSALQKWLHKSRISEGPLFRRMNRWGQLMAEPLGPQGINLMIKRRTGQTIDDLYVSGHSLRRGFITSAVTAGKPMNKIIEITRHKDMRTLQEYFDDAHKFSDHALDGLL

SEQ ID NO: 1390 - protein, 342 aa, Aeromonas sp. A35_P
MNYPRISNPVQQPLQSVFDPQLNSRARRFLRSAKADSTLNAYQADTRIFVFWCQLHGLDPLQTTHHDIMNFLADQADGILADWVWLDKEEGKGELRNGDPRKPATLVRRLAGIRYAFKQKGIHPMPTEHAEIKEMMRGIVRLGDNRKRKTGALTLQPLACVLDEIDTGNLAGLRDYTLLLLMFSGALRRSEAARIEVNDLDFVGQGIRLRLKPSKHQLHETEIALVPGKQYCPVSALARWLKQSRINEGALFRRMNRWGQLTQEPLGPQGINLMIKRRTGQAIDDLQVSGHSLRRGFITSAVTAGKPMKKIIEVTRHKDIRTLQEYFDDAHKFSDHALDGLL

SEQ ID NO: 1391 - protein, 342 aa, Aeromonas rivipollensis
MAYPTISPPAHQSLQTVFDPALNSRARRFLRSAKADSTLNAYQADTRIFVFWCQLHGLDPLQTSHHDIMNFLADQADGILADWVWLDKEEGKGELRNGEPRKPATLVRRLAGIRYAFKQKGIHPMPTEHAEIKEMMRGIVRLGDNRKRKTGALTLQPLTRVLDEIDTTNLAGLRDHTLLLLMFSGALRRSEAARIEVSDLDFVGQGIRLRLKPSKHQLHETEIALIPGKQYCPVTALSRWLKASRISQGPLFRRMTRWGQLTAEPLGPQGINLMIKRRTGQVIDDLYVSGHSLRRGFITSAVTAGKPMNKIIEVTRHKDMRTLQEYFDDAHKFSDHALAGLL

SEQ ID NO: 1392 - protein, 342 aa, Aeromonas dhakensis
MNYPRISNPVQQPLQSVFDPQLNSRARRFLRSAKADSTLNAYQADTRIFVFWCQLHGLDPLQTTHHDIMNFLADQADGILADWVWLDKEEGKGELRNGDPRKPATLVRRLAGIRYAFKQKGIHPMPTEHAEIKEMMRGIVRLGDNRKRKTGALTLQPLACVLDEIDTGNLAGLRDYTLLLLMFSGALRRSEAARIEVDDLDFVGQGIRLRLKPSKHQLHETEIALVPGKQYCPVSALARWLKQSRISEGALFRRMNRWGQLMQEPLGPQGINLMIKRRTGQAIDDLQVSGHSLRRGFITSAVTAGKPMNKIIEVTRHKDIRTLQEYFDDAHKFSDHALDGLL

SEQ ID NO: 1393 - protein, 342 aa, Aeromonas lusitana
MTYPSISNPVHQSLQTVFDPQLNSRARRFLRSAKADSTLNAYEADTRIFVYWCQLQQLDPLQTTHHDIMNFLADQADGILADWVWLDKREGKGELRNGEPRKPATLVRRLAGIRYAFKQKGIHPMPTEHAEIKEMMRGIVRLGDNRKRKTGALTLQPLTQVLDEIDTSNLAGLRDHTLLLLMFSGALRRSEAARIEVSDLDFVGQGIRLRLKPSKHQLHETEIALIPGRHHCPVSALRRWLQKSRINEGPLFRRMNRWGQLMPDPLGPQGINLMIKRRTGQVIDSLYVSGHSLRRGFITSAVTAGKPMNKIIEVTRHKDMRTLQEYFDDAHKFSDHALDGLL

SEQ ID NO: 1394 - protein, 342 aa, Aeromonas dhakensis
MNYPRISNPVQQPLQSVFDPQLNSRARRFLRSAKADSTLNAYQADTRIFVFWCQLHGLDPLQTTHHDIMNFLADQADGILADWVWLDKEEGKGELRNGDPRKPATLVRRLAGIRYAFKQKGIHPMPTEHAEIKEMMRGIVRLGDNRKRKTGALTLKPLACVLDEIDASNLAGLRDYTLLLLMFSGALRRSEAARIEVDDLDFVGQGIRLRLKPSKHQLHETEIALVPGKQYCPVSALARWLKQSRIHEGALFRRMNRWGQLMQEPLGPQGINLMIKRRTGQAIDDLQVSGHSLRRGFITSAVTAGKPMNKIIEVTRHKDIRTLQEYFDDAHKFSDHALDGLL

SEQ ID NO: 1395 - protein, 342 aa, Aeromonas hydrophila
MNYPHIQAQTQQALQSVFDPQLNSRARRFLRSAKADSTLNAYQADTRIFVFWCQLHGLDPLQTTHHDIMNFLADQADGILADWVWLDKEEGKGELRNGEPRKPATLVRRLAGIRYAFKQKGIHPMPTEHAEIKEMMRGIVRLGDNRKRKTGALTLKPLARVLDEIDTGNLAGLRDYTLLLLMFSGALRRSEAARIEVDDLDFVGLGIRLRLKPSKHQLHETEIALVPGKQYCPVSALARWLKQSRISEGALFRRINRWGQLMQEPLGPQGINLMIKRRTGQAIDDLQVSGHSLRRGFITSAVTAGKPMNKIIEVTRHKDIRTLQEYFDDAHKFSDHALDGLL

SEQ ID NO: 1396 - protein, 342 aa, Aeromonas dhakensis
MNYPRISNPVQQPLQSVFDPQLNSRARRFLRSAKADSTLNAYQADTRIFVFWCQLHELDPLQTTHHDIMNFLADQADGILADWVWLDKEEGKGELRNGDPRKPATLVRRLAGIRYAFKQKGIHPMPTEHAEIKEMMRGIVRLGDNRKRKTGALTLQPLACVLDEIDTGNLAGLRDYTLLLLMFSGALRRSEAARIEVDDLDFVGQGIRLRLKPSKHQLHETEIALVPGKQYCPVSALARWLKQSRISEGALFRRMNRWGQLMQEPLGPQGINLMIKRRTGQAIDDLQVSGHSLRRGFITSAVTAGKPMNKIIEVTRHKDIRTLQEYFDDAHKFSDHALDGLL

SEQ ID NO: 1397 - protein, 342 aa, Aeromonas salmonicida
MAYPTVLPPVYQSLQTVFDPQLNSRARRFLRSAKADSTLNAYQADTRIFVFWCQLHGLDPLQTTHHDIMNFLADQADGILADWVWLDKEEGKGELRNGEPRKPATLVRRLAGIRYAFKQKGIHPMPTEHAEIKEMMRGIVRLGDNRKRKTGALTLQPLGRVLDEIDTSNLAGLRDHTLLLLMFSGALRRSEAARIEVSDLDFVGQGIRLRLKPSKHQLHETEIALIPGKQYCPVSALHTWLKKSRIGEGALFRRMNRWGQLMSDPLGPQGINLMIKRRTGQAIDDLYVSGHSLRRGFITSAVTAGKPMNKIIEVTRHKDMRTLQEYFDDAHKFSDHALDGLL

SEQ ID NO: 1398 - protein, 342 aa, Aeromonas sanarellii
MTHSTFPSPAQHSLQAVFDSQLNSRARRFLRSAKAGSTLNAYQADTRIFVFWCQLHGLDPLQSTHHDIMNFLADQADGILADWVWLDKEEGKGELRNGEPRKPATLVRRLAGIRYAFKQKGIHPMPTEHAEIKEMMRGIVRLGDNRKRKTGALTLTPLACVLDEIDTNSLAGLRDYTLLLLMFSGALRRSEAARIEVDDLQFVGQGIRLRLKPSKHQLHESEIALIPGQHYCPVSALQCWLKKSRIEAGPLFRRMNRWGQLTADPLGPQGINLMIKRRTGQAIDDLHVSGHSLRRGFITSAVTAGKPMNKIIEVTRHKDMRTLQEYFDDAHKFSDHALAGLL

SEQ ID NO: 1399 - protein, 342 aa, Aeromonas hydrophila
MNYPHIQVQTQQALQSVFDPQLNSRARRFLRSAKADSTLNAYQADTRIFVCWCQLHELDPLQTTHHDIMNFLADQADGILADWVWLDKEEGKGELRNGEPRKPATLVRRLAGIRYAFKQKGIHPMPTEHSEIKEMMRGIVRLGDNRKRKTGALTLKPLACVLDEIDTGNLAGLRDYTLLLLMFSGALRRSEAARIEVDDLDFVGQGIRLRLKPSKHQLHETEIALVPGKQYCPVSALARWLKQSSISEGALFRRMNRWGQLMQEPLGPQGINLMIKRRTGQAIDDLQVSGHSLRRGFITSAVTAGKPMNKIIEVTRHKDIRTLQEYFDDAHKFSDHALDGLL

SEQ ID NO: 1400 - protein, 342 aa, Aeromonas hydrophila
MNYPHIQAQTQQALQSVFDPQLNSRARRFLRSAKADSTLNAYQADTRIFVFWCQLHGLDPLQTTHHDIMNFLADQADGILADWIWLDKEEGKGELRNGEPRKPATLVRRLAGIRYAFKQKGIHPMPTEHAEIKEMMRGIVRLGDNRKRKTGALTLKPLACVLDEIDTGNLAGLRDYTLLLLMFSGALRRSEAARIEVDDLDFVGQGIRLRLKPSKHQLHETEIALVPGKQYCPVSALARWLKQSRISEGALFRRMNRWGQLMQEPLGPQGINLMIKRRTGQAIDDLQVSGHSLRRGFITSAVTAGKPMNKIIEVTRHKDIRTLQEYFDDAHKFSDHALDGLL

SEQ ID NO: 1401 - protein, 342 aa, Aeromonas hydrophila
MNYPHIQAQTQQALQSVFDPQLNSRARRFLRSAKADSTLNAYQADTRIFVFWCQLHGLDPLQTTHHHIMNFLADQADGILADWIWLDKEEGKGELRNGEPRKPATLVRRLAGIRYAFKQKGIHPMPTEHAEIKEMMRGIVRLGDNRKRKTGALTLKPLACVLDVIDTGNLAGLRDYTLLLLMFSGALRRSEAARIEVDDLDFVGQGIRLRLKPSKHQLHETEIALVPGKQYCPVSALARWLKQSRISEGALFRRMNRWGQLMQEPLGPQGINLMIKRRTGQAIDDLQVSGHSLRRGFITSAVTAGKPMNKIIEVTRHKDIRTLQEYFDDAHKFSDHALDGLL

SEQ ID NO: 1402 - protein, 342 aa, Aeromonas salmonicida
MAYPTVSPPVYQSLQTVFDPQLNSRARRFLRSAKADSTLNAYQADTRIFVFWCQLHGLDPLQTTHHDIMNFLADQADGILADWVWLDKEEGKGELRNGEPRKPATLVRRLAGIRYAFKQKGIHPMPTEHAEIKEMMRGIVRLGDNRKRKTGALTLQPLARVLDEIDTSNLAGLRDHTLLLLMFSGALRRSEAARIEVSDLDFVGQGIRLRLKPSKHQLHETEIALIPGKQYCPVSALHTWLKKSRIGEGALFRRMNRWGQLMSEPLGPQGINLMIKRRTGQAIDDLYVSGHSLRRGFITSAVTAGKPMNKIIEVTRHKDMRTLQEYFDDAHKFSDHALDGLL

SEQ ID NO: 1403 - protein, 342 aa, Aeromonas hydrophila
MNYPHIQAQTQQALQSVFDPQLNSRARRFLRSAKADSTLNAYQADTRIFVFWCQLHGLDPLQTTHHDIMNFLADQADGILADWVWLDKEEGKGELRNGEPRKPATLVRRLAGIRYAFKQKGIHPMPTEHAEIKEMMRGIVRLGDNRKRKTGALTLKPLACVLDEIDTGNLAGLRDYTLLVLMFSGALRRSEAARIEVDDLNFVGQGIRLRLKPSKHQLHETEIALVPGKQYCPVSALARWLKQSRISEGALFRRMNRWGQLMQEPLGPQGINLMIKRRTGQAIDDLQVSGHSLRRGFITSAVTAGKPMNKIIEVTRHKDIRTLQEYFDDAHKFSDHALDGLL

SEQ ID NO: 1404 - protein, 342 aa, Aeromonas hydrophila
MNYPHIQSQTQQALQSVFDPQLNSRARRFLRSAKADSTLNAYQADTRIFVFWCQLHGLDPLQTTHHHIMNFLADQADGILADWVWLDKEEGKGELRNGEPRKPATLVRRLAGIRYAFKQKGIHPMPTEHAEIKEMMRGIVRLGDNRKRKTGALTLKPLACVLDEIDTGNLAGLRDYTLLLLMFSGALRRSEAARIEVDDLDFVGQGIRLRLKPSKHQLHETEIALVPGKQYCPVSALARWLKQSRISEGALFRRMNRWGQLMPEPLGPQGINLMIKRRTGQAIDDLQVSGHSLRRGFITSAVTAGKPMNKIIEVTRHKDIRTLQEYFDDAHKFSDHALDGLL

SEQ ID NO: 1405 - protein, 342 aa, Aeromonas bestiarum
MAYPTLSPSAHQSLQTVFDPQLNSRARRFLRSAKADSTLNAYQADTRIFVFWCQLHGLDPLQTTHHDIMNFLADQADGILADWVWLDKEEGKGELRNGEPRKPATLVRRLAGIRYAFKQKGIHPMPTEHAEIKEMMRGIVRLGDNRKRKTGALTLQPLARVLDEIDTSSLAGLRDHTLLLLMFSGALRRSEAARIEVSDLDFVGQGIRLRLKPSKHQLHETEIALIPGKQYCPVSALHTWLKKSRIGEGALFRRMNRWGQLMSDPLGPQGINLMIKRRTGQAIDDLYVSGHSLRRGFITSAVTAGKPMNKIIEVTRHKDMRTLQEYFDDAHKFSDHALDGLL

SEQ ID NO: 1406 - protein, 342 aa, Aeromonas bestiarum
MAYPTLAPSAHQSLQTVFDPQLNSRARRFLRSAKADSTLNAYQADTRIFVFWCQLHGLDPLQTTHHDIMNFLADQADGILADWVWLDKEEGKGELRNGEPRKPATLVRRLAGIRYAFKQKGIHPMPTEHAEIKEMMRGIVRLGDNRKRKTGALTLQPLARVLDEIDTSNLAGLRDHTLLLLMFSGALRRSEAARIEVSDLDFVGQGIRLRLKPSKHQLHETEIALIPGKQYCPVSALHTWLKKSRIGEGALFRRMNRWGQLMSEPLGPQGINLMIKRRTGQAIDDLYVSGHSLRRGFITSAVTAGKPMNKIIEVTRHKDMRTLQEYFDDAHKFSDHALDGLL

SEQ ID NO: 1407 - protein, 342 aa, Aeromonas salmonicida
MAYPTVSPPVCQSLQTVFDPQLNSRARRFLRSAKADSTLNAYQADTRIFVFWCQLHGLDPLQTTHHDIMNFLADQADGILADWVWLDKEEGKGELRNGEPRKPATLVRRLAGIRYAFKQKGIHPMPTEHAEIKEMMRGIVRLGDNRKRKTGALTLQPLARVLDEIDTSNLAGLRDHTLLLLMFSGALRRSEAARIEVSDLDFVGQGIRLRLKPSKHQLHETEIALIPGKQYCPVSALHTWLKKSRIGEGALFRRMNRWGQLMSEPLGPQGINLMIKRRTGQAIDDLHVSGHSLRRGFITSAVTAGKPMNKIIEVTRHKDMRTLQEYFDDAHKFSDHALDGLL

SEQ ID NO: 1408 - protein, 342 aa, Aeromonas sp. CA23
MAYPTLAPSAHQSLQTVFDPQLNSRARRFLRSAKADSTLNAYQADTRIFVFWCQLHGLDPLQTTHHDIMNFLADQADGILADWVWLDKEEGKGELRNGEPRKPATLVRRLAGIRYAFKQKGIHPMPTEHAEIKEMMRGIVRLGDNRKRKTGALTLQPLARVLDEIDTSSLAGLRDHTLLLLMFSGALRRSEAARIEVSDLDFVGQGIRLRLKPSKHQLHETEIALIPGKQYCPVSALHTWLKKSRIGEGALFRRMNRWGQLMSEPLGPQGINLMIKRRTGQAINDLYVSGHSLRRGFITSAVTAGKPMNKIIEVTRHKDMRTLQEYFDDAHKFSDHALDGLL

SEQ ID NO: 1409 - protein, 342 aa, Aeromonas hydrophila
MNYPHIQAQTQQALQSVFDPQLNSRARRFLRSAKADSTLNAYQADTRIFVCWCQLHGLDPLQTTHHHIMNFLADQADGILADWVWLDKEEGRGELRNGEPRKPATLVRRLAGIRYAFKQKGIHPMPTEHAEIKEMMRGIVRLGDNRKRKTGALTLKPLACVLDEIDTGNLAGLRDYTLLLLMFSGALRRSEAARIEVDDLDFVGQGIRLRLKPSKHQLHETEIAMVPGKQYCPVSALARWLKQSRISEGALFRRMNRWGQLMQEPLGPQGINLMIKRRTGQAIDDLQVSGHSLRRGFITSAVTAGKPMNKIIEVTRHKDIRTLQEYFDDAHKFSDHALDGLL

SEQ ID NO: 1410 - protein, 342 aa, Aeromonas salmonicida
MAYPTVSPPIYQSLQTVFDPQLNSRARRFLRSAKADSTLNAYQADTRIFVFWCQLHGLDPLQTTHHDIMNFLADQADGILADWVWLDKEEGKGELRNGEPRKPATLVRRLAGIRYAFKQKGIHPMPTEHAEIKEMMRGIVRLGDNRKRKTGALTLQPLARVLDEIDTSNLAGLRDHTLLLLMFSGALRRSEAARIEVSDLDFVGQGIRLRLKPSKHQLHETEIALIPGKQYCPVSALHTWLKKSRIGEGALFRRMNRWGQLMSDPLGPQGINLMIKRRTGQVIDDLHVSGHSLRRGFITSAVTAGKPMNKIIEVTRHKDMRTLQEYFDDAHKFSDHALDGLL

SEQ ID NO: 1411 - protein, 342 aa, Aeromonas hydrophila
MNYPHIQAQTQQALQSVFDPQLNSRARRFLRGAKADSTLNAYQADTRIFVFWCQLHGLDPLLTTHHHIMNFLADQADGILADWVWLDKEEGKGELRNGEPRKPATLVRRLAGIRYAFKQKGIHPMPTEHAEIKEMMRGIVRLGDNRKRKTGALTLKPLACVLDEIDTGNLAGLRDYTLLLLMFSGALRRSEAARIEVDDLDFVGQGIRLRLKPSKHQLHETEIALVPGKQYCPVSTLARWLKQSRISEGALFRRMNRWGQLMQEPLGPQGINLMIKRRTGQAIDDLQVSGHSLRRGFITSAVTAGKPMNKIIEVTRHKDIRTLQEYFDDAHKFSDHALDGLL

SEQ ID NO: 1412 - protein, 342 aa, Aeromonas salmonicida
MAYPTVSPPVYQSLQTVFDPQLNSRARRFLRSAKADSTLNAYQADTRIFVFWCQLHGLDPLQTTHHDIMNFLADQADGILADWVWLDKEEGKGELRNGEPRKPATLVRRLAGIRYAFKQKSIHPMPTEHAEIKEMMRGIVRLGDNRKRKTGALTLQPLARVLDEIDTSNLAGLRDHTLLLLMFSGALRRSEAARIEVSDLDFVGQGIRLRLKPSKHQLHETEIALIPGKQYCPVSALHTWLKKSRIGEGALFRRMNRWGQLMSDPLGPQGINLMIKRRTGQAIDDLYVSGHSLRRGFITSAVTAGKPMNKIIEVTRHKDMRTLQEYFDDAHKFSDHALDGLL

SEQ ID NO: 1413 - protein, 310 aa, Aeromonas salmonicida subsp. salmonicida A449
MAYPTVSPPVYQSLQTVFDPQLNSRARRFLRSAKAVSTLNAYQADTRIFVFWCQLHGLDPLQTTHHDIMNFLADQADGILADWVWLDKEEGKGELRNGEPRKPATLVRRLAGIRYAFKQKGIHPMPTEHAEIKEMMRGIVRLGDNRKRKTGALTLQPLGRVLDEIDTSNLAGLRDHTLLLLMFSGALRRSEAARIEVSDLDFVGQGIRLRLKPSKHQLHETEIALIPGKQYCPVSALHTWLKKSRIGEGALFRRMNRWGQLMSEPLGPQGINLMIKRRTGHRRSLCQWPQPATGIHHLGRHRRQAHEQDH

SEQ ID NO: 1414 - protein, 342 aa, Aeromonas sp. ASNIH5
MNYPRLQNPVQQSLQSVFDPQLNSRARRFLRSAKADSTLNAYQADTRIFVSWCQLHGLEPLQTTHHDIMNFLADQADGILANWVWLDKEEGKGELRNGEPRKPATLVRRLAGIRYAFKQKGIHPMPTEHAEIKEMMRGIVRLGDNRKRKTGALTLKPLACVLDEIDTSNLAGLRDYTLLLLMFSGALRRSEAARIEVDDVQFVGQGIRLRLKPSKHQLHESEIALIPGTRYCPVSALQQWLKKSRIAEGPLFRRMNRWGQLMADPLGPQGINLMIKRRTGQAIDDLHVSGHSLRRGFITSAVTAGKPMNKIIEVTRHKDMRTLQEYFDDAHKFSEHALDGLL

SEQ ID NO: 1415 - protein, 342 aa, Aeromonas caviae
MNYPRLQNPVQQSLQSVFDPQLNSRARRFLRSAKADSTLNAYQADTRIFVSWCQLHGLDPLQTTHHDIMNFLADQADGILANWVWLDKEEGKGELRNGEPRKPATLVRRLAGIRYAFKQKGIHPMPTEHAEIKEMMRGIVRLGDNRKRKTGALTLKPLACVLDAIDTSNLAGLRDYTLLLLMFSGALRRSEAARIEVDDVQFVGQGIRLRLKPSKHQLHESEIALIPGTRYCPVSALQQWLKRSRIAEGPLFRRMNRWGQLMADPLGPQGINLMIKRRTGQAIDDLHVSGHSLRRGFITSAVTAGKPMNKIIEVTRHKDMRTLQEYFDDAHKFSDHALDGLL

SEQ ID NO: 1416 - protein, 342 aa, Aeromonas sp. ZOR0002
MNYPRLQNPVQQSLQSVFDPQLNSRARRFLRSAKADSTLNAYQADTRIFVSWCQLHGLDPLQTTHHDIMNFLADQADGILANWVWLDKEEGKGELRNGEPRKPATLVRRLAGIRYAFKQKGIHPMPTEHAEIKEMMRGIVRLGNNRKRKTGALTLKPLACVLDEIDTSNLAGLRDYSLLLLMFSGALRRSEAARIEVNDVQFVGQGIRLRLKPSKHQLHESEIALIPGTRYCPVSALQQWLKKSRIAEGPLFRRMNRWGQLMADPLGPQGINLMIKRRTGQAIDDLHVSGHSLRRGFITFAVTAGKPMNKIIEVTRHKDMRTLQEYFDDAHKFSDHALDGLL

SEQ ID NO: 1417 - protein, 334 aa, Aeromonas veronii
MGRPRKSDTWLPPRVYRGKSAFEFHPRSGGAIRLAPLAATQSAVWAAYEHMMAEQDGDTIKRLVHEFFESADFNDLSATTQKDYRKYSIPVIKVFGGMDPARVESPHIRKYMDKRGQNSKVQANREKAFFSRVFRWAYERGKVKSNPCQGVRQFKEKARTRYITDLEFQAVMDAARPAVRVAMELSYLCAARKGDVLAMRWSQVGEEGITIQQSKTSKIQIKAWSPRLIAAIEQAKQLAGSVVRSSYVICKPNGTPYTDNGFNAAWREAVLTAREQTGWPMDFTFHDIKAKAISDVEGSSRDKQRISGHKTEAQVAAYDRSIEVVPAVDSVKKR

SEQ ID NO: 1418 - protein, 329 aa, Aeromonas allosaccharophila
MQTVFDAQLNSRARRFLRSAKADSTLNAYQADTRIFVFWCQLHGLDPLQTTHHDIMNFLADQADGVLADWVWLDKEEGKGELRNGEPRKPATLVRRLAGIRYAFKQKGIHPMPTEHPEIKEMMRGIVRLGDNRKRKTGALTLQPLTQVLDGIDTHDLSGLRDHTLLLLMFSGALRRSEAARIEVSDLDFVGQGIRLRLKPSKHQLHETEIALIPGKHYCPVSALQNWLRKSRISEGPLFRRMNRWGQLMTEPLGPQGINLMIKRRTGQAIDDLYVSGHSLRRGFITSAVTAGKPMNKIIEVTRHKDMRTLQEYFDDAHKFSDHALDGLL

SEQ ID NO: 1419 - protein, 329 aa, Aeromonas veronii
MQTVFDAQLNSRARRFLRSAKADSTLNAYQADTRIFVFWCQLHGLDPLQTTHHDIMNFLADQADGVLADWVWLDKEEGKGKLRNGEPRKPATLVRRLAGIRYAFKQKGIHPMPTEHPEIKEMMRGIVRLGDNRKRKTGALTLQPLTQVLDGIDTGDLAGLRDHTLLLLMFSGALRRSEAARIEVSDLDFVGQGIRLRLKPSKHQLHETEIALIPGKQYCPVSALQKWLHKSRISEGPLFRRMNRWGQLMAEPLGPQGINLMIKRRTGQTIDDLYVSGHSLRRGFITSAVTAGKPMNKIIEVTRHKDMRTLQEYFDDAHKFSDHALDGLL

SEQ ID NO: 1420 - protein, 329 aa, Aeromonas sp. YN13HZO-058
MQTVFDAQLNSRARRFLRSAKADSTLNAYQADTRIFVFWCQLHGLDPLQTTHHDIMNFLADQADGVLADWVWLDKEEGKGELRNGEPRKPATLVRRLAGIRYAFKQKGIHPMPTEHPEIKEMMRGIVRLGDNRKRKTGALTLQPLTQVLDGIDTHDLAGLRDHTLLLLMFSGALRRSEAARIEVSDLDFVGQGIRLRLKPSKHQLHETEIALIPGKHYCPVSALQNWLHKSRISEGPLFRRMNRWGQLMAEPLGPQGINLMIKRRTGQAIDNLYVSGHSLRRGFITSAVTAGKPMNKIIEVTRHKDMRTLQEYFDDAHKFSEHALDGLL

SEQ ID NO: 1421 - protein, 329 aa, Unknown
  source: /note="Description of Unknown: Unclassified Aeromonas sequence"
MQTVFDAQLNSRARRFLRSAKADSTLNAYQADTRIFVFWCQLHGLDPLQTTHHDIMNFLADQADGVLADWIWLDKEEGKGELRNGEPRKPATLVRRLAGIRYAFKQKGIHPMPTEHPEIKEMMRGIVRLGDNRKRKTGALTLQPLTQVLDGIDTHDLAGLRDHTLLLLMFSGALRRSEAARIEVSDLDFVGQGIRLRLKPSKHQLHETEIALIPGKHYCPVSALQKWLHKSRISEGPLFRRMNRWGQLMAEPLGPQGINLMIKRRTGQTIDDLYVSGHSLRRGFITSAVTAGKPMNKIIEVTRHKDMRTLQEYFDDAHKFSDHALDGLL

SEQ ID NO: 1422 - protein, 329 aa, Aeromonas sp. 159
MQTVFDAQLNSRARRFLRSAKADSTLNAYQADTRIFVFWCQLHGLDPLQTTHHDIMNFLADQADGVLADWIWLDKEGGKGELRNGEPRKPATLVRRLAGIRYAFKQKGIHPMPTEHPEIKEMMRGIVRLGDNRKRKTGALTLQPLIQVLDGIDTNDLAGLRDHTLILLMFSGALRRSEAARIEVSDLDFMGQGIRLRLKPSKHQLHETEIALIPGKHYCPVSALQKWLHKSRISEGPLFRRMNRWGQLMAEPLGPQGINLMIKRRTGQTIDDLYVSGHSLRRGFITSAVTAGKPMNKIIEVTRHKDMRTLQEYFDDAHKFSDHALDGLL

SEQ ID NO: 1423 - protein, 329 aa, Aeromonas veronii
MQTVFDAQLNSRARRFLRSAKAVSTLNAYQADTRIFVFWCQLHGLDPLQTTHHDIMNFLADQADGVLADWVWLDKEEGKGELRNGEPRKPATLVRRLAGIRYAFKQKGIHPMPTEHPEIKEMMRGIVRLGDNRKRKTGALTLQPLTQVLDGIDTGDLAGLRDHTLLLLMFSGALRRSEAARIEVSDLDFVGQGLRLRLKPSKHQLHETEIALIPGKHYCPVSALQNWLHKSRISEGPLFRRMNRWGQLMAEPLGPQGINLMIKRRTGQTIDDLYVSGHSLRRGFITSAVTAGKPMNKIIEVTRHKDMRTLQEYFDDAHKFSDHALDGLL

SEQ ID NO: 1424 - protein, 329 aa, Aeromonas caviae
MQSVFDPQLNSRARRFLRSAKADSTLNAYQADTRIFVSWCQLHGLDPLQTTHHDIMNFLADQADGILANWVWLDKEEGKGELRNGEPRKPATLVRRLAGIRYAFKQKGIHPMPTEHAEIKEMMRGIVRLGDNRKRKTGALTLKPLACVLDEIDTSNLAGLRDYTLLLLMFSGALRRSEAARIEVNDVQFVGQGIRLRLKPSKHQLHESEIALIPGTRYCPVSALQQWLKKSRIAEGPLFRRMNRWGQLMADPLGPQGINLMIKRRTGQAIDDLHVSGHSLRRGFITSAVTAGKPMNKIIEVTRHKDMRTLQEYFDDAHKFSDHALDGLL

SEQ ID NO: 1425 - protein, 329 aa, Aeromonas sp. SCS5
MQTVFDAQLNSRARRFLRSAKANSTLNAYQADTRIFVFWCQLHGLDPLQTTHHDIMNFLADQADGVLADWVWLNKEEGRGELRNGEPRKPATLVRRLAGIRYAFKQKGIHPMPTEHPEIKEMMRGIVRLGDNRKRKTGALTLQPLTQVLDGIDTNDLAGLRDHTLLLLMFSGALRRSEAARIEVSDLDFVGQGIRLRLKPSKHQLHETEIALIPGKHYCPVAAIGNWLKKSRINEGPLFRRMNRWGQLTPDPLGPQGINLMIKRRTGQAIDDLYVSGHSLRRGFITSAVTAGKPMNKIIEVTRHKDMRTLQEYFDDAHKFSDHALDGLL

SEQ ID NO: 1426 - protein, 329 aa, Aeromonas hydrophila
MQSVFDPQLNSRARRFLRSAKADSTLNAYQADTRIFVCWCQLHELDPLQTTHHDIMNFLADQADGILADWVWLDKEEGKGELRNGEPRKPATLVRRLAGIRYAFKQKGIHPMPTEHSEIKEMMRGIVRLGDNRKRKTGALTLKPLACVLDEIDTGNLAGLRDYTLLLLMFSGALRRSEAARIEVDDLDFVGQGIRLRLKPSKHQLHETEIALVPGKQYCPVSALARWLKQSSISEGALFRRMNRWGQLMQEPLGPQGINLMIKRRTGQAIDDLQVSGHSLRRGFITSAVTAGKPMNKIIEVTRHKDIRTLQEYFDDAHKFSDHALDGLL

SEQ ID NO: 1427 - protein, 329 aa, Aeromonas hydrophila YL17
MQSVFDPQLNSRARRFLRSAKADSTLNAYQADTRIFVFWCQLHGLDPLQTTHHHIMNFLADQADGILADWIWLDKEEGKGELRNGEPRKPATLVRRLAGIRYAFKQKGIHPMPTEHAEIKEMMRGIVRLGDNRKRKTGALTLKPLACVLDVIDTGNLAGLRDYTLLLLMFSGALRRSEAARIEVDDLDFVGQGIRLRLKPSKHQLHETEIALVPGKQYCPVSALARWLKQSRISEGALFRRMNRWGQLMQEPLGPQGINLMIKRRTGQAIDDLQVSGHSLRRGFITSAVTAGKPMNKIIEVTRHKDIRTLQEYFDDAHKFSDHALDGLL

SEQ ID NO: 1428 - protein, 329 aa, Aeromonas dhakensis
MQSVFDPQLNSRARRFLRSAKADSTLNAYQADTRIFVFWCQLHGLDPLQTTHHDIMNFLADQADGILADWVWLDKEEGKGELRNGDPRKPATLVRRLAGIRYAFKQKGIHPMPTEHAEIKEMMRGIVRLGDNRKRKTGALTLQPLACVLDEIDTGNLAGLRDYTLLLLMFSGALRRSEAARIEVDDLDFVGQGIRLRLKPSKHQLHETEIALVPGKQYCPVSALARWLKQSRISEGALFRRMNRWGQLMQEPLGPQGINLMIKRRTGQAIDDLQVSGHSLRRGFITSAVTAGKPMNKIIEVTRHKDIRTLQEYFDDAHKFSDHALDGLL

SEQ ID NO: 1429 - protein, 329 aa, Aeromonas hydrophila
MQSVFDPQLNSRARRFLRSAKADSTLNAYQADTRIFVFWCQLHGLDPLQTTHHDIMNFLADQADGILADWVWLDKEEGKGELRNGEPRKPATLVRRLAGIRYAFKQKGIHPMPTEHAEIKEMMRGIVRLGDNRKRKTGALTLKPLACVLDEIDTGNLAGLRDYTLLVLMFSGALRRSEAARIEVDDLNFVGQGIRLRLKPSKHQLHETEIALVPGKQYCPVSALARWLKQSRISEGALFRRMNRWGQLMQEPLGPQGINLMIKRRTGQAIDDLQVSGHSLRRGFITSAVTAGKPMNKIIEVTRHKDIRTLQEYFDDAHKFSDHALDGLL

SEQ ID NO: 1430 - protein, 329 aa, Aeromonas enteropelogenes
MQSVFDPQLNSRARRFLRSAKADSTLNAYQADTRIFVFWCQLHGLDPLQTTHHDIMNFLADQADGILADWVWLDKEEGKGELRNGDPRKPATLVRRLAGIRYAFKQKGIHPMPTEHAEIKEMMRGIVRLGDNRKRKTGALTQQPLACVLDEIDTGNLAGLRDYTLLLLMFSGALRRSEAARIEVDDLDFVGQGIRLRLKPSKHQLHETEIALVPGKQYCPVSALARWLKQSRISEGALFRRMNRWGQLMQEPLGPQGINLMIKRRTGQAIDDLQVSGHSLRRGFITSAVTAGKPMNKIIEVTRHKDIRTLQEYFDDAHKFSDHALDGLL

SEQ ID NO: 1431 - protein, 329 aa, Aeromonas hydrophila
MQSVFDPQLNSRARRFLRSAKADSTLNAYQADTRIFVFWCQLHGLDPLQTTHHHIMNFLADQADGILADWVWLDKEEGKGELRNGEPRKPATLVRRLAGIRYAFKQKGIHPMPTEHAEIKEMMRGIVRLGDNRKRKTGALTLKPLACVLDEIDTGNLAGLRDYTLLLLMFSGALRRSEAARIEVDDLDFVGQGIRLRLKPSKHQLHETEIALVPGKQYCPVSALARWLKQSRISEGALFRRMNRWGQLMPEPLGPQGINLMIKRRTGQAIDDLQVSGHSLRRGFITSAVTAGKPMNKIIEVTRHKDIRTLQEYFDDAHKFSDHALDGLL

SEQ ID NO: 1432 - protein, 329 aa, Aeromonas salmonicida
MQTVFDPQLNSRARRFLRSAKADSTLNAYQADTRIFVFWCQLHGLDPLQTTHHDIMNFLADQADGILADWVWLDKEEGKGELRNGEPRKPATLVRRLAGIRYAFKQKGIHPMPTEHAEIKEMMRGIVRLGDNRKRKTGALTLQPLAKVLDEIDTSNLAGLRDHTLLLLMFSGALRRSEAARIEVSDLDFVGQGIRLRLKPSKHQLHETEIALIPGKQYCPVSALHTWLKKSRIGEGALFRRMNRWGQLMSEPLGPQGINLMIKRRTGQAIDDLYVSGHSLRRGFITSAVTAGKPMNKIIEVTRHKDMRTLQEYFDDAHKFSDHALDGLL

SEQ ID NO: 1433 - protein, 329 aa, Aeromonas hydrophila
MQSVFDPQLNSRARRFLRSAKADSTLNAYQADTRIFVCWCQLHGLDPLQTTHHHIMNFLADQADGILADWVWLDKEEGRGELRNGEPRKPATLVRRLAGIRYAFKQKGIHPMPTEHAEIKEMMRGIVRLGDNRKRKTGALTLKPLACVLDEIDTGNLAGLRDYTLLLLMFSGALRRSEAARIEVDDLDFVGQGIRLRLKPSKHQLHETEIAMVPGKQYCPVSALARWLKQSRISEGALFRRMNRWGQLMQEPLGPQGINLMIKRRTGQAIDDLQVSGHSLRRGFITSAVTAGKPMNKIIEVTRHKDIRTLQEYFDDAHKFSDHALDGLL

SEQ ID NO: 1434 - protein, 329 aa, Aeromonas aquatica
MQAVFDPQLNSRARRFLRSAKADSTLNAYEADTRIFVYWCQLQQLDPLQTTHHDIMNFLADQADGILADWVWLDKQEGKGELRNGEPRKPATLVRRLAGIRYAFKQKGIHPMPTEHAEIKEMMRGIVRLGDNRKRKTGALTLQPLIRVLDDIDTSTLAGLRDHTLLLLMFSGALRRSEAARIEVSDLDFVGQGIRLRLKPSKHQLHETEIALIPGKQYCPVSALANWLKKSRIGEGPLFRRMNRWGQLMPEPLGPQGINLMIKRRTGQVIDDLYVSGHSLRRGFITSAVTAGKPMNKIIEVTRHKDMRTLQEYFDDAHKFSDHALDGLL

SEQ ID NO: 1435 - protein, 329 aa, Aeromonas sp.
MQTVFDPQLNSRARRFLRSAKADSTLNAYQADTRIFVFWCQLHGLDPLQTTHHDIMNFLADQADGILADWVWLDKEEGKGELRNGEPRKPATLVRRLAGIRYAFKQKGIHPMPTEHAEIKEMMRGIVRLGDNRKRKTGALTLQPLARVLDEIDTSNLAGLRDHTLLLLMFSGALRRSEAARIEVSDLDFVGQGIRLRLKPSKHQLHETEIALIPGKQYCPVSALHTWLKKSRIGEGALFRRMNRWGQLMSEPLGPQGINLMIKRRTGQAIDDLYVSGHSLRRGFITSAVTAGKPMNKIIEVTRHKDMRTLQEYFDDAHKFSDHALDGLL

SEQ ID NO: 1436 - protein, 329 aa, Aeromonas hydrophila ML09-119
MQSVFDPQLNSRARRFLRSAKADSTLNAYQADTRIFVFWCQLHGLDPLQTTHHHIMNFLADQADGILADWVWLDKEEGRGELRNGEPRKPATLVRRLAGIRYAFKQKGIHPMPTEHAEIKEMMRGIVRLGDNRKRKTGALTLKPLACVLDEIDTGNLAGLRDYTLLLLMFSGALRRSEAARIEVDDLDFVGQGIRLRLKPSKHQLHETEIALVPGKQYCPVSALARWLKQSRISEGALFRRMNRWGQLMQEPLGPQGINLMIKRRTGQAIDDLQVSGHSLRRGFITSAVTAGKPMNKIIEITRHKDIRTLQEYFDDAHKFSDHALDGLL

SEQ ID NO: 1437 - protein, 329 aa, Aeromonas encheleia
MQAVFDPALNNRARRFLRSAKADSTLNAYQADTRIFVFWCQLHGLDPLQTSHHDIMNFLADQADGILADWVWLDREEGKGELRNGEPRKPATLVRRLAGIRYAFKQKGIHPMPTEHAEIKEMMRGIVRLGDNRKRKTGALTLQPLTRVLDEIDTSNLAGLRDHTLLLLMFSGALRRSEAARIEVSDLDFVGQGIRLRLKPSKHQLHETEIALIPGKQHCPVSALSRWLKASRLSQGPLFRRMTRWGQLTADPLGPQGINLMIKRRTGQAIDDLYVSGHSLRRGFITSAVTAGKPMNKIIEVTRHKDMRTLQEYFDDAHKFSDHALEGLL

SEQ ID NO: 1438 - protein, 329 aa, Aeromonas eucrenophila
MQAVFDPQLNSRARRFLRSAKADSTLNAYEADTRIFVYWCQLQQLDPLQTSHHDIMNFLADQADGILADWVWLDKQEGKGELRNGEPRKPATLVRRLAGIRYAFKQKGIHPMPTEHAEIKEMMRGIVRLGDNRKRKTGALTLQPLIRVLDDIDTSNLAGLRDHTLLLLMFSGALRRSEAARIEVSDLDFVGQGIRLRLKPSKHQLHETEIALIPGKQYCPVSALANWLKKSRIGEGPLFRRMNRWGQLMPEPLGPQGINLMIKRRTGQVIDDLYVSGHSLRRGFITSAVTAGKPMNKIIEVTRHKDMRTLQEYFDDAHKFSDHALDGLL

SEQ ID NO: 1439 - protein, 329 aa, Aeromonas salmonicida
MQTVFDPQLNSRARRFLRSAKADSTLNAYQADTRIFVFWCQLHGLDPLQTTHHDIMNFLADQADGILADWVWLDKEEGKGELRNGEPRKPATLVRRLAGIRYAFKQKGIHPMPTEHAEIKEMMRGIVRLGDNRKRKTGALTLQPLARVLDEIDTSNLAGLRDHTLLLLMFSGALRRSEAARIEVSDLDFVGQGIRLRLKPSKHQLHETEIALIPGKQYCPVSALHTWLKKSRIGEGALFRRMNRWGQLMSEPLGPQGINLMIKRRTGQAIDDLYVSGHSLRRGFITSAVTAGKPMNKIIEVTRHKDMRTLQEYFDYAHKFSDHALDGLL

SEQ ID NO: 1440 - protein, 329 aa, Aeromonas salmonicida
MQTVFDPQLNSRARRFLRSAKADSTLNAYQADTRIFVFWCQLHGLDPLQTTHHDIMNFLADQADGILADWVWLDKEEGKGELRNGEPRKPATLVRRLAGIRYAFKQKGIHPMPTEHAEIKEMMRGIVRLGDNRKRKTGALTLQPLARVLDEIDTSNLAGLRDHTLLLLMFSGALRRSEAARIEVSDLDFVGQGIRLRLKPSKHQLHETEIALIPGKQYCPVSALHTWLKKSRIGEGALFRRMNRWGQLMSDPLGPQGINLMIKRRTGQVIDDLHVSGHSLRRGFITSAVTAGKPMNKIIEVTRHKDMRTLQEYFDDAHKFSDHALDGLL

SEQ ID NO: 1441 - protein, 329 aa, Aeromonas salmonicida
MQTVFDPQLNSRARRFLRSAKAVSTLNAYQADTRIFVFWCQLHGLDPLQTTHHDIMNFLADQADGILADWVWLDKEEGKGELRNGEPRKPATLVRRLAGIRYAFKQKGIHPMPTEHAEIKEMMRGIVRLGDNRKRKTGALTLQPLGRVLDEIDTSNLAGLRDHTLLLLMFSGALRRSEAARIEVSDLDFVGQGIRLRLKPSKHQLHETEIALIPGKQYCPVSALHTWLKKSRIGEGALFRRMNRWGQLMSEPLGPQGINLMIKRRTGQAIDDLYVSGHSLRRGFITSAVTAGKPMNKIIEVTRHKDMRTLQEYFDDAHKFSDHALDGLL

SEQ ID NO: 1442 - protein, 329 aa, Aeromonas salmonicida
MQTVFDPQLNSRARRFLRSAKAVSTLNAYQADTRIFVFWCQLHWLDPLQTTHHDIMNFLADQADGILADWVWLDKEEGKGELRNGEPRKPATLVRRLAGIRYAFKQKGIHPMPTEHAEIKEMMRGIVRLGDNRKRKTGALTLQPLGRVLDEIDTSNLAGLRDHTLLLLMFSGALCRSEAARIEVSDLDFVGQGIRLRLKPSKHQLHETEIALIPGKQYCPVSALHTWLKKSRIGEGALFRRMNRWGQLMSEPLGPQGINLMIKRRTGQAIDDLYVSGHSLRRGFITSAVTAGKPMNKIIEVTRHKDMRTLQEYFDDAHKFSDHALDGLL

SEQ ID NO: 1443 - protein, 329 aa, Aeromonas caviae
MQSVFDPQLNSRARRFLRSAKADSTLNAYQADTRIFVSWCQLHGLDPLQTTHHDIMNFLADQADGILANWVWLDKEEGKGELRNGEPRKPATLVRRLAGIRYAFKQKGIHPMPTEHAEIKEMMRGIVRLGDNRKRKTGALTLKPLACVLDEIDTSNLAGLRDYTLLLLMFSGALRRSEAARIEVNDVQFVGQGIRLCLKPSKHQLHESEIALIPGTRYCPVSALQQWLKKSRIAEGPLFRRMNRWGQLMTDPLGPQGINLMIKRRTGQAIDDLHVSGHSLRRGFITSAVTAGKPMNKIIEVTRHKDMRTLQEYFDDAHKFSDHALDGLL

SEQ ID NO: 1444 - protein, 313 aa, Aeromonas veronii AMC34
MRSAKADSTLNAYQADTRIFVFWCQLHGLDPLQTTHHDIMNFLADQADGVLADWIWLDKEEGKGELRNGEPRKPATLVRRLAGIRYAFKQKGIHPMPTEHPEIKEMMRGIVRLGDNRKHKTGALTLQPLTQVLDGIDTGDLAGLRDHTLLLLMFSGALRRSEAARIEVSDLDFVGQGIRLRLKPSKHQLHETEIALIPGKQYCPVSALQKWLHKSRISEGPLFRRMNRWGQLMAEPLGPQGINLMIKRRTGQTIDDLYVSGHSLRRGFITSAVTAGKPMNKIIEVTRHKDMRTLQEYFDDAHKFSDHALDGLL

SEQ ID NO: 1445 - protein, 313 aa, Aeromonas veronii AER39
MRSAKADSTLNAYQADTRIFVFWCQLHGLDPLQTTHHDIMNFLADQADGVLADWVWLDKEEGKGELRNGEPRKPATLVRRLAGIRYAFKQKGIHPMPTEHPEIKEMMRGIVRLGDNRKRKTGALTLQPLTQVLDGIDTGDLAGLRDHTLLLLMFSGALRRSEAARIEVSDLDFMGQGIRLRLKPSKHQLHETEIALIPGKHYCPVSALQKWLHKSRISEGPLFRRMNRWGQLMAEPLGPQGINLMIKRRTGQTIDDLYVSGHSLRRGFITSAVTAGKPMNKIIEVTRHKDMRTLQEYFDDAHKFSDHALDGLL

SEQ ID NO: 1446 - protein, 313 aa, Aeromonas australiensis
MRSAKADSTLNAYQADTRIFVFWCQLHGLDPLQTTHHDIMNFLADQADGVLADWIWLDKEEGKGELRNGEPRKPATLVRRLAGIRYAFKQKGIHPMPTEHPEIKEMMRGIVRLGDNRKRKTGALTLQPLTQVLDGIDTHDLAGLRDHTLLLLMFSGALRRSEAARIEVSDLDFVGKGIRLRLKPSKHQLHETEIALIPGKHHCPVSALQKWLHKSRISEGALFRRMNRWGQLMAEPLGPQGINLMIKRRTGQTIDDLYVSGHSLRRGFITSAVTAGKPMNKIIEVTRHKDMRTLQEYFDDAHKFSDHALDGLL

SEQ ID NO: 1447 - protein, 313 aa, Aeromonas veronii B565
MRSAKADSTLNAYQADTRIFVFWCQLHGLDPLQTTHHDIMNFLADQADGVLANWVWLDKEEGKGELRNGEPRKPATLVRRLAGIRYAFKQKGIHPMPTEHPEIKEMMRGIVRLGDNRKRKTGALTLQPLTQVLDGIDTGDLAGLRDHTLLLLMFSGALRRSEAARIEVSDLDFVGQGIRLRLKPSKHQLHETEIALIPGKQYCPVSALQKWLHKSRISEGPLFRRMNRWGQLMAEPLGPQGINLMIKRRTGQTIDDLYVSGHSLRRGFITSAVTAGKPMNKIIEVTRHKDMRTLQEYFDDAHKFSDHALDGLL

SEQ ID NO: 1448 - protein, 313 aa, Aeromonas salmonicida subsp. pectinolytica 34mel
MRSAKADSTLNAYQADTRIFVFWCQLHGLDPLQTTHHDIMNFLADQADGILADWVWLDKEEGKGELRNGEPRKPATLVRRLAGIRYAFKQKGIHPMPTEHAEIKEMMRGIVRLGDNRKRKTGALTLQPLARVLDEIDTSNLAGLRDHTLLLLMFSGALRRSEAARIEVSDLDFVGQGIRLRLKPSKHQLHETEIALIPGKQYCPVSALHTWLKKSRIGEGALFRRMNRWGQLMSEPLGPQGINLMIKRRTGQAIDDLYVSGHSLRRGFITSAVTAGKPMNKIIEVTRHKDMRTLQEYFDYAHKFSDHALDGLL

SEQ ID NO: 1449 - protein, 313 aa, Aeromonas salmonicida
MRSAKADSTLNAYQADTRIFVFWCQLHGLDPLQTTHHDIMNFLADQADGILADWVWLDKEEGKGELRNGEPRKPATLVRRLAGIRYAFKQKSIHPMPTEHAEIKEMMRGIVRLGDNRKRKTGALTLQPLARVLDEIDTSNLAGLRDHTLLLLMFSGALRRSEAARIEVSDLDFVGQGIRLRLKPSKHQLHETEIALIPGKQYCPVSALHTWLKKSRIGEGALFRRMNRWGQLMSDPLGPQGINLMIKRRTGQAIDDLYVSGHSLRRGFITSAVTAGKPMNKIIEVTRHKDMRTLQEYFDDAHKFSDHALDGLL

SEQ ID NO: 1450 - protein, 342 aa, Aeromonas veronii
MAFPTLSNPAHQSLQTVFDAQLNSRARRFLRSAKADSTLNAYQADTRIFVFWCQLHRLDPLQTTHHDIMNFLADQADGVLADWVWLDKEEGKGELRNGEPRKPATLVRRLAGIRYAFKQKGIHPMPTEHPEIKEMMRGIVRLGDNRKRKTGALTLQPLTQVLDGIDTHDLAGLRDHTLLLLMFSGALRRSEAARIEVTDLDFVGQGIRLRLKPSKHQLHETEIALIPGKHYCPVSALQKWLHKSRISEGPLFRRMNRWGQLMAEPLGPQGINLMIKRRTGQTIDDLYVSGHSLRRGFITSAVTAGKPMNKIIEVTRHKDMRTLQEYFDDAHKFSDHALDGLL

SEQ ID NO: 1451 - protein, 305 aa, Bacillus nakamurai
MAENVNFFLKLFVEYLQIEKNYSQYTIVNYVNSIEEFEMFLHTQNINGMKEAAYHDVRIFLTEAYEKGLSRKTISKKISALRSFYKFLMREKLVEENPFQLVHLPKQEKRIPKFLYQKELEELFAVSDKSQPSGMRDQALLELLYATGMRVSECCLLTVSDLDLFMDTVLVHGKGKKQRYIPFGSYAREALELYINSGRQCLLEKAKEPHDVLFVNQRGGPLTARGIRYILSGLVKKASGTLHIHPHMLRHTFATHLLNEGADLRSVQELLGHSNLSSTQIYTHVSKEMLRNTYMSHHPRAFKEN

SEQ ID NO: 1452 - protein, 429 aa, Prevotella micans
MIIKRNIIFTLESRKKDGILIIENVPIRMRVNFASKRIEFTTGYRIDAAKWDADKQRVKNGCSNKLKQSASEINASLLGYYTKIQEIFKKFEVKEIMPTQEQIKEAFNALHKPIKEEVKPKKSTPNAFYKVFNEFVRDCGRQNDWTDSTYEKFAAVKNHLMNFHDELTFDFFDEKGLNDYVTYLRDVKEMRNSTIGKQLSFLKWFLRWAFKKGIHQNNAYDSYKPKLKSTQKKIIFLTWEELNRLREFEIPTSKQALDRVRDVFLFQCFTGLRYSDVFNLRRSDIKGDHIEVTTVKTSDSLIIELNNHSKAILDKYKDVAFEDDKVLPVITNQKMNDYLKELAELAGIDEPVRQTYYRGNERIDEVTPKYALLGTHAGRRTFICNALALGIPPQVVMKWTGHSDYKAMKPYIDIADDIKANAMSKFNQL

SEQ ID NO: 1453 - protein, 342 aa, Aeromonas veronii
MAYPSLSNPAHQSLQTVFDAQLNSRARRFLRSAKADSTLNAYQADTRIFVFWCQLHGLDPLQTTHHDIMNFLADQADGVLADWIWLDKEEGKGELRNGEPRKPATLVRRLAGIRYAFKQKGIHPMPTEHPEIKEMMRGIVRLGDNRKHKTGALTLQPLTQVLDGIDTGDLAGLRDHTLLLLMFSGALRRSEAARIEVSDLDFVGQGIRLRLKPSKHQLHETEIALIPGKHYCPVSALQKWLHKSRISEGPLFRRMNRWGQLMAEPLGPQGINLMIKRRTGQTIDDLYVSGHSLRRGFITSAVTAGKPMNKIIEVTRHKDMRTLQEYFDDAHKFSDHALDGLL

SEQ ID NO: 1454 - protein, 342 aa, Aeromonas veronii
MAYPTLSNPAHQSLQTVFDAQLNSRARRFLRSAKADSTLNAYQADTRIFVFWCQLHGLDPLQTTHHDIMNFLADQADGVLADWVWLDKEEGNGELRNGEPRKPATLVRRLAGIRYAFRQKGIHPMPTEHPEIKEMMRGIVRLGDNRKRKTGALTLQPLTQVLDGIDTGDLAGLRDHTLLLLMFSGALRRSEAARIEVSDLDFVGQGLRLRLKPSKHQLHETEIALILGKHYCPVSALQKWLHKSRISEGPLFRRMNRWGQLMAEPLGPQGINLMIKRRTGQTIDDLYVSGHSLRRGFITSAVTAGKPMNKIIEVTRHKDMRTLQEYFDDAHKFSDHALDGLL

SEQ ID NO: 1455 - protein, 342 aa, Aeromonas veronii
MAYPSLSNPAHQSLQTVFDAQLNSRARRFLRSAKADSTLNAYQADTRIFVFWCQLHGLDPLQTTHHDIMNFLADQADGVLADWVWLDKEEGKGELRNGEPRKPATLVRRLAGIRYAFKQKGIHPMPTEHPEIKEMMRGIVRLGDNRKRKTGALTLQPLTQVLDGIDTGDLAGLRDHTLLLLMFSGALRRSEAARIEVSDLDFVGQGIRLRLKPSKHQLHETEIALILGKHYCPVSALQKWLHKSRISEGPLFRRMNRWGQLLAEPLGPQGINLMIKRRTGQTIDDLYVSGHSLRRGFITSAVTAGKPMNKIIEVTRHKDMRTLQEYFDDAHKFSDHALDGLL

SEQ ID NO: 1456 - protein, 342 aa, Aeromonas dhakensis
MNYPRISNPVQQPLQSVFDPQLNSRARRFLRSAKADSTLNAYQADTRIFVFWCQLHGLDPLQTTHHDIMNFLADQADGILADWVWLDKEEGKGELRNGDPRKPATLVRRLAGIRYAFKQKGIHPMPTEHAEIKEMMRGIVRLGDNRKRKTGALTLQPLACVLDEIDTGNLAGLRDYTLLLLMFSGALRRSEAARIEVDDLDFVGQGIRLRLKPSKHQLHETEIALVPGKQYCPVSALARWLKQSRISEGALFRRMNRWGQLTQEPLGPQGINLMIKRRTGQAIDDLQVSGHSLRRGFITSAVTAGKPMNKIIEVTRHKDIRTLQEYFDDAHKFSDHALDGLL

SEQ ID NO: 1457 - protein, 342 aa, Aeromonas sp. HMWF017
MAYPSLSNPAHQSLQTVFDAQLNSRARRFLRSAKADSTLNAYQADTRIFVFWCQLHGLDPLQTTHHDIMNFLADQADGVLADWIWLDKEEGKGELRNGEPRKPATLVRRLAGIRYAFKQKGIHPMPTEHPEIKEMMRGIVRLGDNRKHKTSALTLQPLTQVLDGIDTGDLAGLRDHTLLLLMFSGALRRSEAARIEVSDLDFMGQGIRLRLKPSKHQLHETEIALIPGKHYCPVSALQKWLHKSRISEGPLFRRMNRWGQLMAEPLGPQGINLMIKRRTGQTIDDLYVSGHSLRRGFITSAVTAGKPMNKIIEVTRHKDMRTLQEYFDDAHKFSDHALDGLL

SEQ ID NO: 1458 - protein, 342 aa, Aeromonas veronii
MAYPTLSNPAHQSLQTVFDAQLNSRARRFLRSAKADSTLNAYQTDTRIFVFWCQLHELEPLKTTHHDIMNFLADQADGVLADWVWLDKDEGKGELRNGEPRKPATLVRRLAGIRYAFKQKGIHPMPTEHPEIKEMMRGIVRLGDNRKRKTGALTLQPLTQVLDGIDTGDLAGLRDHTLLLLMFSGALRRSEAARIEVSDLDFVGQGIRLRLKPSKHQLHETEIALIPGKHYCPVSALQKWLHKSRISEGPLFRRMNRWGQLMAEPLGPQGINLMIKRRTGQTIDDLYVSGHSLRRGFITSAVTAGKPMNKIIEVTRHKDMRTLQEYFDDAHKFSDHALDGLL

SEQ ID NO: 1459 - protein, 342 aa, Aeromonas dhakensis
MNYPRILNPVQQPLQSVFDPQLNSRARRFLRSAKADATLNAYQADTRIFVFWCQLHGLDPLQTTHHDIMNFLADQADGILADWIWLDKEEGKGELRNGEPRKPATLVRRLAGIRYAFKQKGIHPMPTEHAEIKEMMRGIVRLGDNRKRKTGALTLQPLACVLDEIDTGNLAGLRDYTLLLLMFSGALRRSEAARIEVDDLDFVGQGIRLRLKPSKHQLHETEIALVPGKQYCPVSALARWLKQSRISEGALFRRMNRWGQLMQEPLGPQGINLMIKRRTGQAIDDLQVSGHSLRRGFITSAVTAGKPMNKIIEVTRHKDIRTLQEYFDDAHKFSDHALDGLL

SEQ ID NO: 1460 - protein, 342 aa, Aeromonas veronii
MTYPTLSNPAHQSLQTVFDAQLNSRARRFLRSAKADSTLNAYQADTRIFVFWCQLHGLDPLQTTHHDIMNFLADQADGVLADWVWLDKEEGKGELRNGEPRKPATLVRRLAGIRYAFKQKGIHPMPTEHPEIKEMMRGIVRLGDNRKRKTGALTLQPLTQVLDGIDTNDLAGLRDHTLILLMFSGALRRSEAARIEVSDLDFMGQGIRLRLKPSKHQLHETEIALIPGKHYCPVSALQKWLHKSRISEGALFRRMNRWGQLMAEPLGPQGINLMIKRRTGQTIDDLYVSGHSLRRGFITSAVTAGKPMNKIIEVTRHKDMRTLQEYFDDAHKFSDHALDGLL

SEQ ID NO: 1461 - protein, 342 aa, Aeromonas sobria
MAFPTLSNPAHQSLQTVFDAQLNSRARRFLRSAKADSTLNAYQADTRIFVFWCQLHGLDPLQTTHHDIMNFLADQADGVLADWVWLDKEEGKGELRNGEPRKPATLVRRLAGIRYAFKQKGINPMPTEHPEIKEMMRGIVRLGDNRKRKTGALTLQPLTRVLDGIDTTNLAGLRDHTLLLLMFSGALRRSEAARIEVSDLDFVGQGIRLRLKPSKHQLHETEIALIPGKHHCPVSALQHWLRKSRISEGHLFRRMNRWGQLMTDPLGPQGINLMIKRRTGQAIDDLYVSGHSLRRGFITSAVTAGKPMNKIIEVTRHKDMRTLQEYFDDAHKFSDHALDGLL

SEQ ID NO: 1462 - protein, 342 aa, Aeromonas veronii
MAYPSLSNPAHQSLQTVFDAQLNSRARRFLRSAKADSTLNAYQADTRIFVFWCQLHGIDPLQTTHHDIMNFLADQADGVLADWVWLDKEEGKGELRNGEPRKPATLVRRLAGIRYAFKQKGIHPMPTEHPEIKEMMRGIVRLGDNRKRKTGALTLQPLTQVLDGIDTGDLAGLRDHTLLLLMFSGALRRSEAARIEVSDLDFVGQGIRLRLKPSKHQLHETEIALIPGKHYCPVSALQNWLRKSRISEGPLFRRMNRWGQLMAEPLGPQGINLMIKRRTGQAIDDLYVSGHSLRRGFITSAVTAGKPMNKIIEVTRHKDMRTLQEYFDDAHKFSDHALDGLL

SEQ ID NO: 1463 - protein, 342 aa, Aeromonas jandaei
MSHPSISGSAHQSLQTVFDAQLNSRARRFLRSAKADSTLNAYQTDTRIFVFWCQLHGLDPLQTTHHDIMNFLADQADGVLANWVWLNKEEGRGELRNGEPRKPATLVRRLAGIRYAFKQKGIHPMPTEHPEIKEMMRGIVRLGDNRKRKTGALTLQPLTQVLDGIDTNDLAGLRDHTLLLLMFSGALRRSEAARIEVSDLDFVGQGIRLRLKPSKHQLHETEIALIPGKHYCPVAAIGNWLKKSRINEGPLFRRMNRWGQLTPDPLGPQGINLMIKRRTGQAIDDLYVSGHSLRRGFITSAVTAGKPMNKIIEVTRHKDMRTLQEYFDDAHKFSDHALDGLL

SEQ ID NO: 1464 - protein, 342 aa, Aeromonas veronii
MAYPSLSNPAHQSLQTVFDAQLNSRARRFLRSAKADSTLNAYQADTRIFVFWCQLHGLDPLQTTHHDIMNFLADQADGVLANWVWLDKEEGKGELRNGEPRKPATLVRRLAGIRYAFKQKGIHPMPTEHPEIKEMMRGIVRLGDNRKRKTGALTLQPLTQVLDGIDTGDLAGLRDHTLLLLMFSGALRRSEAARIEVSDLDFVGQGIRLRLKPSKHQLHETEIALIPGKQYCPVSALQNWLHKSRISEGPLFRRMNRWGQLMAEPLGPQGINLMIKRRTGQTIDDLYVSGHSLRRGFITSAVTAGKPMNKIIEVTRHKDMRTLQEYFDDAHKFSDHALDGLL

SEQ ID NO: 1465 - protein, 342 aa, Aeromonas veronii
MTYPTLSNPAHQSLQTVFDAQLNSRARRFLRSAKADSTLNAYQADTRIFVFWCQLHGLDPLQTTHHDIMNFLADQADGVLADWVWLDKEEGKGELRNGEPRKPATLVRRLAGIRYAFKQKGIHPMPTEHPEIKEMMRGIVRLGDNRKRKTGALTLQPLTQVLDGIDTRDLAGLRDHTLLLLMFSGALRRSEAARIEVSDLDFVGQGIRLRLKPSKHQLHETEIALIPGKHYCPVSALQNWLSKSRISEGPLFRRMNRWGQLMAEPLGPQGINLMIKRRTGQTIDDLYVSGHSLRRGFITSAVTAGKPMNKIIEVTRHKDMRTLQEYFDDAHKFSDHALNGLL

SEQ ID NO: 1466 - protein, 342 aa, Aeromonas veronii
MAYPTLSNPAHQSLQTVFDAQLNSRARRFLRSAKADSTLNAYQADTRIFVFWCQLHGLDPLQTTHHDIMNFLADQADGVLADWVWLDKEEGKGELRNGEPRKPATLVRRLAGIRYAFKQKGIHPMPTEHPEIKEMMRGIVRLGDNRKRKTGALTLQPLTQVLDGIDTGDLAGLRDHTLLLLMFSGALRRSEAARIEVSDLDFVGQGIRLRLKPSKHQLHETEIALIPGKHYCPVSALQKWLHKSRISEGPLFRRMNRWGQLMAEPLGPQGINLMIKRRTGQTIDDLYVSGHSLRRGFITSAVTAGKPMNKIIEVTRHKDMRTLQEYFDDAHKFSDHALDGLL

SEQ ID NO: 1467 - protein, 342 aa, Aeromonas allosaccharophila
MAYPTLSSPAHQSLQTVFDAQLNSRARRFLRSAKADSTLNAYQADTRIFVFWCQLHGLDPLQTTHHDIMNFLADQADGVLADWVWLDKEEGKGELRNGEPRKPATLVRRLAGIRYAFKQKGIHPMPTEHPEIKEMMRGIVRLGDNRKRKTGALTLQPLTQVLDGIDTHDLAGLRDHTLLLLMFSGALRRSEAARIEVSDLDFVGQGIRLRLKPSKHQLHETEIALIPGKHYCPVSALQNWLRKSRINEGPLFRRMNRWGQLMAEPLGPQGINLMIKRRTGQAIDDLYVSGHSLRRGFITSAVTAGKPMNKIIEVTRHKDMRTLQEYFDDAHKFSDHALDGLL

SEQ ID NO: 1468 - protein, 342 aa, Aeromonas caviae
MNYPRLQNRVQQSLQSIFDPQLNSRARRFLRSAKADSTLNAYQADTRIFVSWCQLHGLDPLQTTHHDIMNFLADQADGVLANWVWLDKEEGKGELRNGEPRKPATLVRRLAGIRYAFKQKGIHPMPTEHAEIKEMMRGIVRLGDNRKRKTGALTLKPLACVLDEIDTCNLAGLRDYTLLLLMFSGALRRSEAARIEVNDVQFVGQGIRLRLKPSKHQLHESEIALIPGTRYCPVAALQQWLKKSRIAEGPLFRRMNRWGQLMADPLGPQGINLMIKRRTGQAIDDLHVSGHSLRRGFITSAVTAGKPMNKIIEVTRHKDMRTLQEYFDDAHKFSDHALDGLL

SEQ ID NO: 1469 - protein, 342 aa, Aeromonas media
MAYPTISPPAHQSLQTVFDPALNSRARRFLRSAKADSTLNAYQADTRIFVFWCQLHGLDPLQTSHHDIMNFLADQADGILADWVWLDKEEGKGELRNGEPRKPATLVRRLAGIRYAFKQKGIHPMPTEHAEIKEMMRGIVRLGDNRKRKTGALTLQPLTRVLDEIDTSTLAGLRDHTLLLLMFSGALRRSEAARIEVSDLDFVGQGIRLRLKPSKHQLHETEIALIPGKHYCPVTALGRWLKASRISQGPLFRRMTRWGQLTADPLGPQGINLMIKRRTGQVIDDLYVSGHSLRRGFITSAVTAGKPMNKIIEVTRHKDMRTLQEYFDDAHKFSDHALAGLL

SEQ ID NO: 1470 - protein, 342 aa, Aeromonas dhakensis
MNYPRISNPVQQPLQSVFDPQLNSRARRFLRSAKADSTLNAYQADTRIFVFWCQLHGLDPLQTTHHDIMNFLADQADGILADWVWLDKEEGKGELRNGDPRKPATLVRRLAGIRYAFKQKGIHPMPTEHAEIKEMMRGIVRLGDNRKRKTGALTLQPLACVLDEIDTGNLAGLRDYTLLLLMFSGALRRSEAARIEVDDLDFVGQGIRLRLKPSKHQLHETEIALVPGKQYCPVSALARWLKQSRIHEGALFRRMNRWGQLTQEPLGPQGINLMIKRRTGQAIDDLQVSGHSLRRGFITSAVTAGKPMNKIIEVTRHKDIRTLQEYFDDAHKFSDHALDGLL

SEQ ID NO: 1471 - protein, 342 aa, Aeromonas sp.
MNYPRISNPVQQPLQSVFDPQLNSRARRFLRSAKADSTLNAYQADTRIFVFWCQLHGLDPLQTTHHDIMNFLADQADGILADWVWLDKEEGKGELRNGDPRKPATLVRRLAGIRYAFKQKGIHPMPTEHAEIKEMMRGIVRLGDNRKRKTGALTLKPLACVLDEIDTSNLAGLRDYTLLLLMFSGALRRSEAARIEVDDLDFVGQGIRLRLKPSKHQLHETEIALVPGKQYCPVSALARWLKQSRIHEGALFRRMNRWGQLMQEPLGPQGINLMIKRRTGQAIDDLQVSGHSLRRGFITSAVTAGKPMNKIIEVTRHKDIRTLQEYFDDAHKFSDHALDGLL

SEQ ID NO: 1472 - protein, 342 aa, Aeromonas dhakensis
MNYPRISNPVQQPLQSVFDPQLNSRARRFLRSAKADSTLNAYQADTRIFVFWCQLHGLDPLQTTHHDIMNFLADQADGILADWVWLDKEEGKGELRNGDPRKPATLVRRLAGIRYAFKQKGIHPMPTEHAEIKEMMRGIVRLGDNRKRKTGALTLQPLACVLDEIDTGNLAGLRDYTLLLLMFSGALRRSEAARIEVDDLNFVGQGIRLRLKPSKHQLHETEIALVPGKQYCPVSALARWLKQSRIHEGALFRRMNRWGQLTQEPLGPQGINLMIKRRTGQAIDDLQVSGHSLRRGFITSAVTAGKPMNKIIEVTRHKDIRTLQEYFDDAHKFSDHALDGLL

SEQ ID NO: 1473 - protein, 342 aa, Aeromonas dhakensis
MNYPRISNPVQQPLQSVFDPQLNSRARRFLRSAKADSTLNAYQADTRIFVFWCQLHGLDPLQTTHHDIMNFLADQADGILADWVWLDKEEGKGELRNGDPRKPATLVRRLAGIRYAFKQKGIHPMPTEHAEIKEMMRGIVRLGDNRKRKTGALTLKPLACVLDEIDTSTLAGLRDYTLLLLMFSGALRRSEAARIEVDDLDFVGQGIRLRLKPSKHQLHETEIALVPGKQYCPVSALARWLKQSRIHEGALFRRMNRWGQLMQEPLGPQGINLMIKRRTGQAIDDLQVSGHSLRRGFITSAVTAGKPMNKIIEVTRHKDIRTLQEYFDDAHKFSDHALDGLL

SEQ ID NO: 1474 - protein, 342 aa, Aeromonas media
MAYPTISQPVQQSLQTVFDPALNSRARRFLRSAKADSTLNAYQADTRIFVFWCQLHGLDPLQTSHHDIMNFLADQADGILADWVWLDKEEGKGELRNGEPRKPATLVRRLAGIRYAFKQKGIHPMPTEHAEIKEMMRGIVRLGDNRKRKTGALTLQPLARVLDEIDTSTLAGLRDHTLLLLMFSGALRRSEAARIEVGDLDFVGQGIRLRLKPSKHQLHETEIALIPGKQYCPVTALSRWLKASRISQGPLFRRMTRWGQLTAEPLGPQGINLMIKRRTGQVIDDLYVSGHSLRRGFITSAVTAGKPMNKIIEVTRHKDMRTLQEYFDDAHKFSDHALAGLL

SEQ ID NO: 1475 - protein, 342 aa, Aeromonas dhakensis
MNYPRISNPVQQPLQSVFDPQLNSRARRFLRSAKADSTLNAYQADTRIFVFWCQLHGLDPLQTTHHDIMNFLADQADGILADWVWLDKEEGKGELRNGDPRKPATLVRRLAGIRYAFKQKGIHPMPTEHAEIKEMMRGIVRLGDNRKRKTGALTLQPLACVLDEIDTGNLAGLRDYTLLLLMFSGALRRSEAARIEVDDLDFVGQGIRLRLKPSKHQLHETEIALVPGKQYCPVSALARWLKQSRIHEGALFRRMNRWGQLMQEPLGPQGINLMIKRRTGQAIDDLQVSGHSLRRGFITSAVTAGKPMNKIIEVTRHKDIRTLQEYFDDAHKFSDHALDGLL

SEQ ID NO: 1476 - protein, 342 aa, Aeromonas dhakensis
MNYPRISSPVQQPLQSVFDPQLNSRARRFLRSAKADSTLNAYQADTRIFVFWCQLHGLDPLQTTHHDIMNFLADQADGILADWVWLDKEEGKGELRNGDPRKPATLVRRLAGIRYAFKQKGIHPMPTEHAEIKEMMRGIVRLGDNRKRKTGALTLKPLACVLDEIDTGNLAGLRDYTLLLLMFSGALRRSEAARIEVDDLDFVGQGIRLRLKPSKHQLHETEIALVPGKQYCPVSALARWLKQSRIHEGALFRRMNRWGQLMQEPLGPQGINLMIKRRTGQAIDDLQVSGHSLRRGFITSAVTAGKPMNKIIEVTRHKDIRTLQEYFDDAHKFSDHALDGLL

SEQ ID NO: 1477 - protein, 342 aa, Aeromonas hydrophila
MNYPHIQAQTQQALQSVFDPQLNSRARRFLRSAKADSTLNAYQADTRIFVFWCQLHGLDPLQTTHHDIMNFLADQAEGILADWVWLDKEEGKGELRNGEPRKPATLVRRLAGIRYAFKQKGIHPMPTEHAEIKEMMRGIVRLGDNRKRKTGALTLKPLACVLDEIDTGNLVGLRDYTLLLLMFSGALRRSEAARIEVDDLDFVGQGIRLRLKPSKHQLHETEIALVPGKQYCPVSALARWLKQSRISEGALFRRMNRWGQLMQEPLGPQGINLMIKRRTGQAIDDLQVSGHSLRRGFITSAVTAGKPMNKIIEVTRHKDIRTLQEYFDNAHKFSDHALDGLL

SEQ ID NO: 1478 - protein, 342 aa, Aeromonas hydrophila
MNYPHIQPQTQQALQSVFDPQLNSRARRFLRSAKADSTLNAYQADTRIFVFWCQLHGLDPLQTTHHDIMNFLADQADGILADWVWLDKEEGKGELRNGEPRKPATLVRRLAGIRYAFKQKGIHPMPTEHAEIKEMMRGIVRLGDNRKRKTGALTLKPLACVLDEIDTGNLAGLRDYTLLLLMFSGALRRSEAARIEVDDLDFVGQGIRLRLKPSKHQLHETEIALVPGKQYCPVSALARWLKQSRISEGALFRRMNRWGQLMQEPLGPQGINLMIKRRTGQAIDDLQVSGHSLRRGFITSAVTAGKPMNKIIEVTRHKDIRTLQEYFDDAHKFSDHALDGLF

SEQ ID NO: 1479 - protein, 342 aa, Aeromonas hydrophila
MNYPHIQAQTQQALQSVFDPQLNSRAKRFLRSAKADSTLNAYQADTRIFVFWCQLHGLDPLQTTHHDIMNFLADQADGILADWIWLDKEEGKGELRNGEPRKPATLVRRLAGIRYAFKQKGIHPMPTEHAEIKEMMRGIVRLGDNRKRKTGALTLKPLACVLDEIDTGNLAGLRDYTLLLLMFSGALRRSEAARIEVDDLDFVGQGIRLRLKPSKHQLHETEIALVPGKQYCPVSALARWLKQSRISEGALFRRMNRWGQLMQEPLGPQGINLMIKRRTGQAIDDLQVSGHSLRRGFITSAVTAGKPMNKIIEVTRHKDIRTLQEYFDDAHKFSDHALDGLL

SEQ ID NO: 1480 - protein, 342 aa, Aeromonas hydrophila
MNYPHIQAQAQQALQSVFDPQLNSRARRFLRSAKADSTLNAYQADTRIFVFWCQLHGLDPLQTTHHDIMNFLADQADGILADWVWLDKEEGKGELRNGEPRKPATLVRRLAGIRYAFKQKGIHPMPTEHAEIKEMMRGIVRLGDNRKRKTGALTLKPLACVLDEIDTGNLAGLRDYTLLLLMFSGALRRSEAARIEVDDLDFVGQGIRLRLKPSKHQLHETEIALVPGKQYCPVSALARWLKQSRISEGALFRRMNRWGQLMQEPLGPQGINLMIKRRTGQAIDDLQVSGHSLRRGFITSAVTAGKPMNKIIEVTRHKDIRTLQEYFDDAHKFSDHALDGLL

SEQ ID NO: 1481 - protein, 342 aa, Aeromonas hydrophila
MNYTHIQAQTQQALQSVFDPQLNNRARRFLRSAKADSTLNAYQADTRIFVCWCQLHGLDPLQTTHHDIMNFLADQADGILADWVWLDKEEGKGELRNGEPRKPATLVRRLAGIRYAFKQKGIHPMPTEHAEIKEMMRGIVRLGDNRKRKTGALTLKPLACVLDEIDTGNLAGLRDYTLLLLMFSGALRRSEAARIEVDDLDFVGQGIRLRLKPSKHQLHETEIALVPGKQYCPVSALARWLKQSRISEGALFRRMNRWGQLMQEPLGPQGINLMIKRRTGQAIDDLQVSGHSLRRGFITSAVTAGKPMNKIIEVTRHKDIRTLQEYFDDAHKFSDHALDGLL

SEQ ID NO: 1482 - protein, 342 aa, Aeromonas hydrophila
MNYPHIQAQTKQALQSVFDPQLNSRARRFLRSAKADSTLNAYQADTRIFVFWCQLHGLDPLQTTHHDIMNFLADQADGILADWVWLDKEEGKGELRNGEPRKPATLVRRLAGIRYAFKQKGIHPMPTEHAEIKEMMRGIVRLGDNRKRKTGALTLKPLACVLDEIDTGNLAGLRDYTLLLLMFSGALRRSEAARIEVDDLDFVGQGIRLRLKPSKHQLHETEIALVPGKQYCPVSALARWLKQSRISEGALFRRMNRWGQLMQEPLGPQGINLMIKRRTGQAIDDLQVSGHSLRRGFITSAVTAGKPMNKIIEVTRHKDIRTLQEYFDDAHKFSDHALDGLL

SEQ ID NO: 1483 - protein, 342 aa, Aeromonas salmonicida
MAYPTVSPPVYQSLQTVFDPLLNSRARRFLRSAKADSTLNAYQADTRIFVFWCQLHGLDPLQTTHHDIMNFLADQADGILADWVWLDKEEGKGELRNGEPRKPATLVRRLAGIRYAFKQKGIHPMPTEHAEIKEMMRGIVRLGDNRKRKTGALTLQPLGRVLDEIDTSNLAGLRDHTLLLLMFSGALRRSEAARIEVSDLDFVGQGIRLRLKPSKHQLHETEIALIPGKQYCPVSALHTWLKKSRIGEGALFRRMNRWGQLMSEPLGPQGINLMIKRRTGQAIDDLYVSGHSLRRGFITSAVTAGKPMNKIIEVTRHKDMRTLQEYFDDAHKFSDHALDGLL

SEQ ID NO: 1484 - protein, 347 aa, Aeromonas salmonicida
MAYPTVSPPVYQSLQTVFDPQLNSRARRFLRSAKAVSTLNAYQADTRIFVFWCQLHGLDPLQTTHHDIMNFLADQADGILADWVWLDKEEGKGELRNGEPRKPATLVRRLAGIRYAFKQKGIHPMPTEHAEIKEMMRGIVRLGDNRKRKTGALTLQPLGRVLDEIDTSNLAGLRDHTLLLLMFSGALRRSEAARIEVSDLDFVGQGIRLRLKPSKHQLHETEIALIPGKQYCPVSALHTWLKKSRIGEGALFRRMNRWGQLMSEPLGPQGINLMIKRRTGQAIDDLYVSGHSLRRGFITSAVTAGKPMNKIIEVTRHKDMRTLQEYFDDAHKFSDHGVLGIFPSKVT

SEQ ID NO: 1485 - protein, 342 aa, Aeromonas sp.
MNYPHIQAQTQQALQSVFDPQLNSRARRFLRSAKADSTLNAYQADTRIFVFWCQLHGLDPLQTTHHDIMNFLADQADGILADWVWLDKEEGKGELRNGEPRKPATLVRRLAGIRYAFKQKGIHPMPTEHAEIKEMMRGIVRLGDNRKRKTGALTLKPLASVLDEIDTGNLAGLRDYTLLLLMFSGALRRSEAARIEVDDLDFVGQGIRLRLKPSKHQLHETEIALVPGKQYCPVSALARWLKQSRISEGALFRRMNRWGQLMPEPLGPQGINLMIKRRTGQAIDDLQVSGHSLRRGFITSAVTAGKPMNKIIEVTRHKDIRTLQEYFDDAHKFSDHALDGLL

SEQ ID NO: 1486 - protein, 342 aa, Aeromonas salmonicida
MAYPTVSPPIYQSLQTVFDPQLNSRARRFLRSAKADSTLNAYQADTRIFVFWCQLHGLDPLQTTHHDIMNFLADQADGILADWVWLDKEEGKGELRNGEPRKPATLVRRLAGIRYAFKQKGIHPMPTEHAEIKEMMRGIVRLGDNRKRKTGALTLQPLAKVLDEIDTSNLAGLRDHTLLLLMFSGALRRSEAARIEVSDLDFVGQGIRLRLKPSKHQLHETEIALIPGKQYCPVSALHTWLKKSRIGEGALFRRMNRWGQLMSEPLGPQGINLMIKRRTGQAIDDLYVSGHSLRRGFITSAVTAGKPMNKIIEVTRHKDMRTLQEYFDDAHKFSDHALDGLL

SEQ ID NO: 1487 - protein, 337 aa, Aeromonas sp.
MATTPAVTDMPDTGSAPAIRTAVTPQDDHNHAARHRVFLAAATSDNTRQAYRSAVKHYLDWGGVLPANEPAVIRYLVRYADTLNPRTLALRLTALSQWHVHQGFADPAATPTVRKTLAGIARTNGRPKKKAKALPIEDLELIVANLASLGTLKAARDNALLQVGFFGGFRRSELVGIKVDHITWEAQGITLTLPRSKTDQTGEGVAKAIPYSAGPCCPATALRTWLDAAGVASGPVFRSISKWGVVGADRLNPASVNTILAGAAQLAKLGYVPELSSHSLRRGMATSAHRAGAEFRDIKKQGGWRHDGTVQGYIEEAGLFEENAAGSLLRSRTRTSG

SEQ ID NO: 1488 - protein, 342 aa, Aeromonas hydrophila
MNYQQIQAQTHQALQSVFDPQLNSRARRFLRSAKADSTLNAYQADTRIFVFWCQLHGLDPLQTTHHHIMNFLADQADGILADWVWLDKEEGKGELRNGEPRKPATLVRRLAGIRYAFKQKGIHPMPTEHAEIKEMMRGIVRLGDNRKRKTGALTLKPLACVLDEIDTGNLAGLRDYTLLLLMFSGALRRSEAARIEVDDLDFVGQGIRLRLKPSKHQLHETEIALVPGKQYCPVSALARWLKQSRISEGALFRRMNRWGQLMQEPLGPQGINLMIKRRTGQAIDDLQVSGHSLRRGFITSAVTAGKPMNKIIEVTRHKDIRTLQEYFDDAHKFSDHALDGLL

SEQ ID NO: 1489 - protein, 342 aa, Aeromonas hydrophila
MNYPHIQAQTQQALQSVFDPQLNSRARRFLRSAKADSTLNAYQADTRIFVFWCQLHGLDPLQTTHHDIMNFLADQADGILADWVWLDKEERKGELRNGEPRKPATLVRRLAGIRYAFKQKGIHPMPTEHAEIKEMMRGIVRLGDNRKRKTGALTLKPLACVLDEIDTGNLAGLRDYTLLLLMFSGALRRSEAARIEVDDLDFVGQGIRLRLKPSKHQLHETEIALVPGKQYCPVSALARWLKQSRISEGALFRRMNRWGQLMQEPLGPQGINLMIKRRTGQAIDDLQVSGHSLRRGFITSAVTAGKPMNKIIEVTRHKDIRTLQEYFDDAHKFSDHALDGLL

SEQ ID NO: 1490 - protein, 342 aa, Aeromonas hydrophila
MNYPHIQAQTQQALQSVFDPQLNSRARRFLRSAKADSTLNAYQADTRIFVFWCQLHGLDPLQTTHHDIMNFLADQADGILADWVWLDKEEGKGELRNGEPRKPATLVRRLAGIRYAFKQKGIHPMPTEHAEIKEMMRGIVRLGDNRKRKTGALTLKPLAYVLDEIDTGNLAGLRDYTLLLLMFSGALRRSEAARIEVGDLDFVGQGIRLRLKPSKHQLHETEIALVPGKQYCPVSALARWLKQSRISEGALFRRMNRWGQLMQEPLGPQGINLMIKRRTGQAIDDLQVSGHSLRRGFITSAVTAGKPMNKIIEVTRHKDIRTLQEYFDDAHKFSDHALDGLL

SEQ ID NO: 1491 - protein, 342 aa, Aeromonas hydrophila
MNYPHIQAQTQQALQSVFDPQLNSRARRFLRSAKADSTLSAYQADTRIFVFWCQLHGLDPLQTTHHDIMNFLADQADGILADWVWLDKEEGKGELRNGEPRKPATLVRRLAGIRYAFKQKGIHPMPTEHAEIKEMMRGIVRLGDNRKRKTGALTLKPLACVLDEIDTGNLAGLRDYTLLLLMFSGALRRSEAARIEVDDLDFVGQGIRLRLKPSKHQLHETEIALVPGKQYCPVSALARWLKQSRISEGALFRRMNRWGQLMQEPLGPQGINLMIKRRTGQAIDDLQVSGHSLRRGFITSAVTAGKPMNKIIEVTRHKDIRTLQEYFDDAHKFSDHALDGLL

SEQ ID NO: 1492 - protein, 342 aa, Aeromonas salmonicida
MAYPTVSPPVYQSLQTVFDPQLNSRARRFLRSAKADSTLNAYQADTRIFVFWCQLHGLDPLQTTHHDIMNFLADQADGILADWVWLDKEEGKGELRNGEPRKPATLVRRLAGIRYAFKQKGIHPMPTEHAEIKEMMRGIVRLGDNRKRKTGALTLQPLARVLDEIDTSNLAGLRDHTLLLLMFSGALRRSEAARIEVSDLDFVGQGIRLRLKPSKHQLHETEIALIPGKQYCPVSALHTWLKKSRIGEGALFRRMNRWGQLMSEPLGPQGINLMIKRRTGQAIDDLYVSGHSLRRGFITSAVTAGKPMNKIIEVTRHKDMRTLQEYFDYAHKFSDHALDGLL

SEQ ID NO: 1493 - protein, 342 aa, Aeromonas hydrophila
MNYPDIQAQTQQALQSVFDPQLNSRARRFLRSAKADSTLNAYQADTRIFVFWCQLHGLDPLQTTHHHIMNFLADQADGILADWVWLDKEEGRGELRNGEPRKPATLVRRLAGIRYAFKQKGIHPMPTEHAEIKEMMRGIVRLGDNRKRKTGALTLKPLACVLDEIDTGNLAGLRDYTLLLLMFSGALRRSEAARIEVDDLDFVGQGIRLRLKPSKHQLHETEIALVPGKQYCPVSALARWLKQSRISEGALFRRMNRWGQLMQEPLGPQGINLMIKRRTGQAIDDLQVSGHSLRRGFITSAVTAGKPMNKIIEVTRHKDIRTLQEYFDDAHKFSDHALDGLL

SEQ ID NO: 1494 - protein, 342 aa, Aeromonas hydrophila
MNYPHIQAQTQQALQSVFDPQLNSRARRFLRSAKADSTLNAYQADTRIFVFWCQLHGLDPLQTTHHHIMNFLADQADGILADWVWLDKEEGRGELRNGEPRKPATLVRRLAGIRYAFKQKGIHPMPTEHAEIKEMMRGIVRLGDNRKRKTGALTLKPLACVLDEIDTGNLAGLRDYTLLLLMFSGALRRSEAARIEVDDLDFVGQGIRLRLKPSKHQLHETEIAMVPGKQYCPVSALARWLKQSRISEGALFRRMNRWGQLMQEPLGPQGINLMIKRRTGQAIDDLQVSGHSLRRGFITSAVTAGKPMNKIIEVTRHKDIRTLQEYFDDAHKFSDHALDGLL

SEQ ID NO: 1495 - protein, 342 aa, Aeromonas hydrophila
MNYPHIQAQTQQALQSVFDPQLNSRARRFLRSAKADSTLNAYQADTRIFVFWCQLHGLDPLLTTHHHIMNFLADQADGILADWIWLDKEEGKGELRNGEPRKPATLVRRLAGIRYAFKQKGIHPMPTEHAEIKEMMRGIVRLGDNRKRKTGALTLKPLACVLDEIDTGNLAGLRDYTLLLLMFSGALRRSEAARIEVDDLDFVGQGIRLRLKPSKHQLHETEIALVPGKQYCPVSALARWLKQSRISEGALFRRMNRWGQLMPEPLGPQGINLMIKRRTGQAIDDLQVSGHSLRRGFITSAVTAGKPMNKIIEVTRHKDIRTLQEYFDDAHKFSDHALDGLL

SEQ ID NO: 1496 - protein, 342 aa, Aeromonas hydrophila
MNYPHIQAQTQQALQSVFDPQLNSRARRFLRSAKADSTLNAYQADTRIFVFWCQLHGLDPLQTTHHDIMNFLADQADGILADWVWLDKEEGKGELRNGEPRKPATLVRRLAGIRYAFKQKGIHPMPTEHAEIKEMMRGIVRLGDNRKRKTGALTLKPLACVLDEIDIGNLAGLRDYTLLLLMFSGALRRSEAARIEVDDLDFVGQGIRLRLKPSKHQLHETEIALVPGKQYCPVSALALWLKQSRISEGALFRRMNRWGQLMQEPLGPQGINLMIKRRTGQAIDDLQVSGHSLRRGFITSAVTAGKPMNKIIEITRHKDIRTLQEYFDDAHKFSDHALDGLL

SEQ ID NO: 1497 - protein, 342 aa, Aeromonas salmonicida
MAYPTVSPPVYQSLQTVFDPQLNSRARRFLRSAKADSTLNAYQADTRIFVFWCQLHMLDPLQTTHHDIMNFLADQADGILADWVWLDKEAGKGELRNGEPRKPATLVRRLAGIRYAFKQKGIHPMPTEHAEIKEMMRGIVRLGDNRKRKTGALTLQPLARVLDEIDTSNLAGLRDHTLLLLMFSGALRRSEAARIEVSDLDFVGQGIRLRLKPSKHQLHETEIALIPGKQYCPVSALHTWLKKSRIGEGALFRRMNRWGQLMPDPLGPQGINLMIKRRTGQAIDDLYVSGHSLRRGFITSAVTAGKPMNKIIEVTRHKDMRTLQEYFDDAHKFSDHALDGLL

SEQ ID NO: 1498 - protein, 342 aa, Aeromonas sp. ASNIH2
MNYPRLQNPVQQSLQSVFDPQLNSRARRFLRSAKADSTLNAYQADTRIFVSWCQLHGLDPLQTTHHDIMNFLADQADGILANWVWLDKEEGKGELRNGKPRKPATLVRRLAGIRYAFKQKGIHPMPTEHAEIKEMMRGIVRLGDNRKRKTGALTLKPLACVLDEIDTSNLAGLRDYTLLLLMFSGALRRSEAARIEVDDVQFVGQGIRLRLKPSKHQLHESEIALIPGTRYCPVSALQQWLKKSRIAEGPLFRRMNRWGQLMTDPLGPQGINLMIKRRTDQAIDDLHVSGHSLRRGFITSAVTAGKPMNKIIEVTRHKDMRTLQEYFDDAHKFSDHALDGLL

SEQ ID NO: 1499 - protein, 342 aa, Aeromonas caviae
MNYPSLQNPVQQSLQSVFDPQLNSRARRFLRSAKADSTLNAYQADTRIFVSWCQLHGLDPLQTTHHDIMNFLADQADGILANWVWLDKEEGKGELRNGEPRKPATLVRRLAGIRYAFKQKGIHPMPTEHAEIKEMMRGIVRLGDNRKRKTGALTLKPLACVLDEIDTSNLAGLRDYTLLLLMFSGALRRSEAARIEVNDVQFVGQGIRLRLKPSKHQLHESEIALIPGTRYCPVSALQQWLKKSRIAEGPLFRRMNRWGQLMTDPLGPQGINLMIKRRTGQAIDDLHVSGHSLRRGFITSAVTAGKPMNKIIEVTRHKDMRTLQEYFDDAHKFSDHALDGLL

SEQ ID NO: 1500 - protein, 342 aa, Aeromonas media
MNYPSLQNPVQQSLQSVFDPQLNSRARRFLRSAKADSTLNAYQADTRIFVSWCQLHGLEPLQTTHHDIMNFLADQADGILANWVWLDKEEGKGELRNGEPRKPATLVRRLAGIRYAFKQKGIHPMPTEHAEIKEMMRGIVRLGDNRKRKTGALTLKPLACVLDEIDTSNLAGLRDYTLLLLMFSGALRRSEAARIEVDDVQFVGQGIRLRLKPSKHQLHESEIALIPGTRYCPVSALQQWLKRSRIAEGPLFRRMNRWGQLMADPLGPQGINLMIKRRTGQGIDDLHVSGHSLRRGFITSAVTAGKPMNKIIEVTRHKDMRTLQEYFDDAHKFSDHALDGLL

SEQ ID NO: 1501 - protein, 342 aa, Aeromonas sp. HZM
MNYPRLQNPVQQSLQSVFDPQLNSRARRFLRSAKADSTLNAYQADTRIFVSWCQLHGLEPLQTTHHDIMNFLADQADGILANWVWLDKEEGKGELRNGEPRKPATLVRRLAGIRYAFKQKGIHPMPTEHAEIKEMMRGIVRLGDNRKRKTGALTLKPLACVLDAIDTSNLAGLRDYTLLLLMFSGALRRSEAARIEVNDVQFVGQGIRLRLKPSKHQLHESEIALIPGIRYCPVSALQQWLKKSRIAEGPLFRRMNRWGQLMADPLGPQGINLMIKRRTGQAIDDLHVSGHSLRRGFITSAVTAGKPMNKIIEVTRHKDMRTLQEYFDDAHKFSDHALDGLL

SEQ ID NO: 1502 - protein, 342 aa, Aeromonas sp. ASNIH8
MNYPRLQNPVQQSLQSVFDPQLNSRARRFLRSAKADSTLNAYQADTRIFVSWCQLHGLDPLQTTHHDIMNFLADQADGVLANWVWLDKEEGKGELRNGEPRKPATLVRRLAGIRYAFKQKGIHPMPTEHAEIKEMMRGIVRLGDNRKRKTGALTLKPLACVLDEIDTSNLAGLRDYTLLLLMFSGALRRSEAARIEVDDVQFVGQGIRLRLKPSKHQLHESEIALIPGIRYCPVSALQQWLKKSRIAEGPLFRRMNRWGQLMADPLGPQGINLMIKRRTGQAIDDLHVSGHSLRRGFITSAVTAGKPMNKIIEVTRHKDMRTLQEYFDDAHKFSDHALDGLL

SEQ ID NO: 1503 - protein, 342 aa, Aeromonas enteropelogenes
MAYPTFSNPAHQSLQTIFDAQLNSRARRFLRSAKADSTLNAYQADTRIFVFWCQLHGLDPLQITHHDIMNFLADQADGVLADWVWLDKEEGKGELRNGEPRKPATLVRRLAGIRYAFQQKGIHPMPTEHPEIKEMMRGIVRLGDNRKRKTGALTLQPLARVLSGIDTSTLAGLRDYTLLLLMFSGALRRSEAARIEVSDLDFVGQGIRLRLKPSKHQLHETEIALVPGKQYCPVQGLQHWLEKSRIKEGALFRRMNRWGQLTEEPLGPQGINQMIKRRTGQAIDDLYVSGHSLRRGFITSAVTAGKPMNKIIEVTRHKDMRTLQEYFDDANKFSDHALDGLL

SEQ ID NO: 1504 - protein, 342 aa, Aeromonas sp. ASNIH7
MNYPSLQNPVQQSLQSVFDPQLNSRARRFLRSAKADSTLNAYQADTRIFVSWCQLHGLDPLQTTHHDIMNFLADQADGILANWVWLDKEEGKGELRNGEPRKPATLVRRLAGIRYAFKQKGIHPMPTEHAEIKEMMRGIVRLGDNRKRKTGALTLKPLACVLDEIDTCNLAGLRDYTLLLLMFSGALRRSEAARIEVNDVQFVGQGIRLRLKPSKHQLHESEIALIPGTRYCPVSALQQWLKKSRIAEGPLFRRMNRWGQLMADPLGPQGINLMIKRRTGQAIDDLHVSGHSLRRGFITSAVTAGKPMNKIIEVTRHKDMRTLQEYFDDAHKFSDHALDGLL

SEQ ID NO: 1505 - protein, 342 aa, Aeromonas sp. ASNIH3
MNYPRLQNPVQQSLQSVFDPQLNSRARRFLRSAKADSTLNAYQADTRIFVSWCQLHGLDPLQTTHHDIMNFLADQADGVLANWVWLDKEEGKGELRNGEPRKPATLVRRLAGIRYAFKQKGIHPMPTEHAEIKEMMRGIVRLGDNRKRKTGALTLKPLACVLDEIDTSNLAGLRDYTLLLLMFSGALRRSEAARIEVDDVQFVGQGIRLRLKPSKHQLHESEIALIPGTRYCPVSALQQWLKKSRIAEGPLFRRMNRWGQLMADPLGPQGINLMIKRRTGQAIDDLHVSGHSLRRGFITSAVTAGKPMNKIIEVTRHKDMRTLQEYFDDAHKFSDHALDGLL

SEQ ID NO: 1506 - protein, 342 aa, Aeromonas allosaccharophila
MAYPTVSPPVYQSLQTVFDPQLNSRARRFLRSAKADSTLNAYQADTRIFVFWCQLHGLDPLQTTHHDIMNFLADQADGVLADWVWLDKEEGKGELRNGEPRKPATLVRRLAGIRYAFKQKGIHPMPTEHPEIKEMMRGIVRLGDNRKRKTGALTLQPLIQVLNGIDTHDLAGLRDHTLLLLMFSGALRRSEAARIEVSDLDFVGQGIRLRLKPSKHQLHETEIALIPGKHYCPVSALQNWLHKSRISEGPLFRRMNRWGQLMAEPLGPQGINLMIKRRTGQAIDDLYVSGHSLRRGFITSAVTAGKPMNKIIEVTRHKDMRTLQEYFDDAHKFSDHALDGLL

SEQ ID NO: 1507 - protein, 342 aa, Aeromonas caviae
MNYPRLQNPVQQSLQSVFDPQLNSRARRFLRSAKADSTLNAYQADTRIFVSWCQLHGLEPLQTTHHDIMNFLADQADGILANWVWLDKEEGKGELRNGEPRKPATLVRRLAGIRYAFKQKGIHPMPTEHAEIKEMMRGIVRLGDNRKRKTGALTLKPLACVLDEIDTSNLAGLRDYTLLLLMFSGALRRSEAARIEVDDVQFVGQGIRLRLKPSKHQLHESEIALIPGTRYCPVSALQQWLKRSRIAEGPLFRRMNRWGQLMADPLGPQGINLMIKRRTGQAIDDLHVSGHSLRRGFITSAVTAGKPMNKIIEVTRHKDMRTLQEYFDDAHKFSDHALDGLL

SEQ ID NO: 1508 - protein, 342 aa, Aeromonas caviae
MNYPRLQNPVQQSLQSVFDPQLNSRARRFLRSAKADSTLNAYQADTRIFVSWCQLHGLDPLQTTHHDIMNFLADQADGILANWVWLDKEEGKGELRNGEPRKPATLVRRLAGIRYAFKQKGIHPMPTEHAEIKEMMRGIVRLGDNRKRKTGALTLKPLACVLDEIDTSNLAGLRDYTLLLLMFSGALRRSEAARIEVNDVQFVGQGIRLRLKPSKHQLHESEIALIPGTRYCPVSALQQWLKKSRIAEGPLFRRMNRWGQLMADPLGPQGINLMIKRRTGQAIDDLHVSGHSLRRGFITSAVTAGKPMNKIIEVTRHKDMRTLQEYFDDAHKFSDHALDGLL

SEQ ID NO: 1509 - protein, 342 aa, Aeromonas encheleia
MAYPTVSPPVHQSLQAVFDPALNNRARRFLRSAKADSTLNAYQADTRIFVFWCQLHGLDPLQTSHHDIMNFLADQADGILADWVWLDREEGKGELRNGEPRKPATLVRRLAGIRYAFKQKGIHPMPTEHAEIKEMMRGIVRLGDNRKRKTGALTLQPLTRVLDEIDTSNLAGLRDHTLLLLMFSGALRRSEAARIEVSDLDFVGQGIRLRLKPSKHQLHETEIALIPGKQHCPVSALSRWLKASRLSQGPLFRRMTRWGQLTADPLGPQGINLMIKRRTGQAIDDLYVSGHSLRRGFITSAVTAGKPMNKIIEVTRHKDMRTLQEYFDDAHKFSDHALEGLL

SEQ ID NO: 1510 - protein, 329 aa, Aeromonas jandaei
MQTVFDAQLNSRARRFLRSAKADSTLNAYQADTRIFVFWCQLHGLDPLQTTHHDIMNFLADQADGVLADWVWLNKEEGRGELRNGEPRKPATLVRRLAGIRYAFKQKGIHPMPTEHPEIKEMMRGIVRLGDNRKRKTGALTLQPLTQVLDGIDTNDLAGLRDHTLLLLMFSGALRRSEAARIEMSDLDFVGQGIRLRLKPSKHQLHETEIALIPGKHYCPVAAIGNWLKKSRINEGPLFRRMNRWGQLTPDPLGPQGINLMIKRRTGQAIDGLYVSGHSLRRGFITSAVTAGKPMNKIIEVTRHKDMRTLQEYFDDAHKFSDHALDGLL

SEQ ID NO: 1511 - protein, 329 aa, Aeromonas jandaei
MQTVFDAQLNSRARRFLRSAKADSTLNAYQADTRIFVFWCQLHGLDPLQTTHHDIMNFLADQADGVLADWVWLNKEEGRGELRNGEPRKPATLVRRLAGIRYAFKQKGIHPMPTEHPEIKEMMRGIVRLGDNRKRKTGALTLQPLTQVLDGIDTNNLAGLRDHTLLLLMFSGALRRSEAARIEVSDLDFVGQGIRLRLKPSKHQLHETEIALIPGKHYCPVAAIGNWLKKSRINEGPLFRRMNRWGQLTPDPLGPQGINLMIKRRTGQAIDDLYVSGHSLRRGFITSAVTAGKPMNKIIEVTRHKDMRTLQEYFDDAHKFSDHALDGLL

SEQ ID NO: 1512 - protein, 329 aa, Aeromonas veronii
MQTVFDTQLNSRARRFLRSAKADSTLNAYQADTRIFVCWCQLHGLDPLQTTHHDIMNFLADQADGVLADWVWLDKEEGKGELRNGEPRKPATLVRRLAGIRYAFKQKGIHPMPTEHPEIKEMMRGIVRLGDNRKRKTGALTLQPLTQVLDGIDTGDLAGLRDHTLLLLMFSGALRRSEAARIEVSDLDFVGQGIRLRLKPSKHQLHETEIALIPGKHYCPVSALQKWLHKSRISEGPLFRRMNRWGQLMAEPLGPQGINLMIKRRTGQTIDDLYVSGHSLRRGFITSAVTAGKPMNKIIEVTRHKDMRTLQEYFDDAHKFSDHALDGLL

SEQ ID NO: 1513 - protein, 329 aa, Aeromonas veronii
MQTVFDAQLNSRARRFLRSAKADSTLNAYQADTRIFVFWCQLHGLDPLQTTHHDIMNFLADQADGVLADWVWLDKEEGKGELRNGEPRKPATLVRRLAGIRYAFKQKGIHPMPTEHPEIKEMMRGIVRLGDNRKRKTGALTLQPLTQVLDGIDIGDLAGLRDHTLLLLMFSGALRRSEAARIEVSDLDFVGQGIRLRLKPSKHQLHETEIALIPGKHYCPVSALQNWLRKSRISEGPLFRRMNRWGQLMTEPLGPQGINLMIKRRTGQAIDDLYVSGHSLRRGFITSAVTAGKPMNKIIEVTRHKDMRTLQEYFDDAHKFSDHALDGLL

SEQ ID NO: 1514 - protein, 329 aa, Aeromonas veronii
MQTVFDAQLNSRARRFLRSAKADSTLNAYQADTRIFVFWCQLHGLDPLQTTHHDIMNFLADQADGVLANWVWLDKEEGKGELRNGEPRKPATLVRRLAGIRYAFKQKGIHPMPTEHPEIKEMMRGIVRLGDNRKRKTGALTLQPLTQVLDGIDTGDLAGLRDHTLLLLMFSGALRRSEAARIEVSDLDFVGQGIRLRLKPSKHQLHETEIALIPGKQYCPVSALQKWLHKSRISEGPLFRRMNRWGQLMAEPLGPQGINLMIKRRTGQTIDDLYVSGHSLRRGFITSAVTAGKPMNKIIEVTRHKDMRTLQEYFDDAHKFSDHALDGLL

SEQ ID NO: 1515 - protein, 329 aa, Aeromonas allosaccharophila
MQTVFDAQLNSRARRFLRSAKADSTLNAYQADTRIFVFWCQLHGLDPLQTTHHDIMNFLADQADGVLADWVWLDKEEGKGELRNGEPRKPATLVRRLAGIRYAFKQKGIHPMPTEHPEIKEMMRGIVRLGDNRKRKTGALTLQPLTQVLDGIDTHDLAGLRDHTLLLLMFSGALRRSEAARIEVSDLDFVGQGIRLRLKPSKHQLHETEIALIPGKHYCPVSALQNWLRKSRINEGPLFRRMNRWGQLMAEPLGPQGINLMIKRRTGQAIDDLYVSGHSLRRGFITSAVTAGKPMNKIIEVTRHKDMRTLQEYFDDAHKFSDHALDGLL

SEQ ID NO: 1516 - protein, 329 aa, Aeromonas veronii
MQTVFDAQLNSRARRFLRSAKADSTLNAYQADTRIFVFWCQLHGLDPLQTTHHDIMNFLADQADGVLADWIWLDKEEGKGELRNGEPRKPATLVRRLAGIRYAFKQKGIHPMPTEHPEIKEMMRGIVRLGDNRKHKTGALTLQPLTQVLDGIDTGDLAGLRDHTLLLLMFSGALRRSEAARIEVSDLDFVGQGIRLRLKPSKHQLHETEIALIPGKHYCPVSALQKWLHKSRISEGPLFRRMNRWGQLMAEPLGPQGINLMIKRRTGQTIDDLYVSGHSLRRGFITSAVTAGKPMNKIIEVTRHKDMRTLQEYFDDAHKFSDHALDGLL

SEQ ID NO: 1517 - protein, 329 aa, Aeromonas dhakensis
MQSVFDPQLNSRARRFLRSAKADATLNAYQADTRIFVFWCQLHGLDPLQTTHHDIMNFLADQADGILADWIWLDKEEGKGELRNGEPRKPATLVRRLAGIRYAFKQKGIHPMPTEHAEIKEMMRGIVRLGDNRKRKTGALTLQPLACVLDEIDTGNLAGLRDYTLLLLMFSGALRRSEAARIEVDDLDFVGQGIRLRLKPSKHQLHETEIALVPGKQYCPVSALARWLKQSRISEGALFRRMNRWGQLMQEPLGPQGINLMIKRRTGQAIDDLQVSGHSLRRGFITSAVTAGKPMNKIIEVTRHKDIRTLQEYFDDAHKFSDHALDGLL

SEQ ID NO: 1518 - protein, 329 aa, Aeromonas popoffii
MQTVFDAQLNSRARRFLRGAKADSTLNAYQADTRIFVFWCLLHGLDPLQTTHHDIMNFLADQADGVLADWVWLDKEEGKGELRNGEPRKPATLVRRLAGIRYAFKQKGIHPMPTEHAEIKEMMRGIVRLGDNRKRKTGALTLQPLTQVLDGIDTTALAGLRDHTLLLLMFSGALRRSEAARIEVSDLDFVGQGIRLRLKPSKHQLHETEIALIPGKHYCPVSALQNWLRKSRISDGPLFRRMNRWGQLMTEPLGPQGINLMIKRRTGQTIDDLYVSGHSLRRGFITSAVTAGKPMNKIIEVTRHKDMRTLQEYFDDAHKFSDHALDGLL

SEQ ID NO: 1519 - protein, 329 aa, Aeromonas caviae
MQSVFDPQLNSRARRFLRSAKADSTLNAYQADTRIFVSWCQLHGLEPLQTTHHDIMNFLADQADGILANWVWLDKEEGKGELRNGEPRKPATLVRRLAGIRYAFKQKGIHPMPTEHAEIKEMMRGIVRLGDNRKRKTGALTLKPLACVLDEIDTSNLAGLRDYTLLLLMFSGALRRSEAARIEVDDVQFVGQGIRLRLKPSKHQLHESEIALIPGTRYCPVSALQQWLKRSRIAEGPLFRRMNRWGQLMADPLGPQGINLMIKRRTGQAIDDLHVSGHSLRRGFITSAVTAGKPMNKIIEVTRHKDMRTLQEYFDDAHKFSDHALDGLL

SEQ ID NO: 1520 - protein, 329 aa, Aeromonas caviae
MQSIFDPQLNSRARRFLRSAKADSTLNAYQADTRIFVSWCQLHGLDPLQTTHHDIMNFLADQADGVLANWVWLDKEEGKGELRNGEPRKPATLVRRLAGIRYAFKQKGIHPMPTEHAEIKEMMRGIVRLGDNRKRKTGALTLKPLACVLDEIDTCNLAGLRDYTLLLLMFSGALRRSEAARIEVNDVQFVGQGIRLRLKPSKHQLHESEIALIPGTRYCPVAALQQWLKKSRIAEGPLFRRMNRWGQLMADPLGPQGINLMIKRRTGQAIDDLHVSGHSLRRGFITSAVTAGKPMNKIIEVTRHKDMRTLQEYFDDAHKFSDHALDGLL

SEQ ID NO: 1521 - protein, 329 aa, Aeromonas hydrophila
MQSVFDPQLNSRARRFLRSAKADSTLNAYQADTRIFVFWCQLHGLDPLQTTHHDIMNFLADQADGILADWVWLDKEERKGELRNGEPRKPATLVRRLAGIRYAFKQKGIHPMPTEHAEIKEMMRGIVRLGDNRKRKTGALTLKPLACVLDEIDTGNLAGLRDYTLLLLMFSGALRRSEAARIEVDDLDFVGQGIRLRLKPSKHQLHETEIALVPGKQYCPVSALARWLKQSRISEGALFRRMNRWGQLMQEPLGPQGINLMIKRRTGQAIDDLQVSGHSLRRGFITSAVTAGKPMNKIIEVTRHKDIRTLQEYFDDAHKFSDHALDGLL

SEQ ID NO: 1522 - protein, 329 aa, Aeromonas piscicola
MQTVFDPQLNSRARRFLRSAKADSTLNAYQADTRIFVFWCQLHGLDPLQTTHHDIMNFLADQADGILADWVWLDKEEGKGELRNGEPRKPATLVRRLAGIRYAFKQKGIHPMPTEHAEIKEMMRGIVRLGDNRKRKTGALTLQPLGRVLDEIDTSNLAGLRDHTLLLLMFSGALRRSEAARIEVSDLDFVGQGIRLRLKPSKHQLHETEIALIPGKQYCPISALHTWLKKSRIGEGALFRRMNRWGQLMSEPLGPQGINLMIKRRTGQAIDDLYVSGHSLRRGFITSAVTAGKPMNKIIEVTRHKDMRTLQEYFDDAHKFSDHALDGLL

SEQ ID NO: 1523 - protein, 329 aa, Aeromonas hydrophila
MQSVFDPQLNSRARRFLRSAKADSTLNAYQADTRIFVFWCQLHGLDPLQTTHHHIMNFLADQADGILADWVWLDKEEGRGELRNGEPRKPATLVRRLAGIRYAFKQKGIHPMPTEHAEIKEMMRGIVRLGDNRKRKTGALTLKPLACVLDEIDTGNLAGLRDYTLLLLMFSGALRRSEAARIEVDDLDFVGQGIRLRLKPSKHQLHETEIALVPGKQYCPVSALARWLKQSRISEGALFRRMNRWGQLMQEPLGPQGINLMIKRRTGQAIDDLQVSGHSLRRGFITSAVTAGKPMNKIIEVTRHKDIRTLQEYFDDAHKFSDHALDGLL

SEQ ID NO: 1524 - protein, 329 aa, Aeromonas hydrophila
MQSVFDPQLNSRARRFLRSAKADSTLNAYQADTRIFVFWCQLHGLDPLQTTHHHIMNFLADQADGILADWVWLDKEEGRGELRNGEPRKPATLVRRLAGIRYAFKQKGIHPMPTEHAEIKEMMRGIVRLGDNRKRKTGALTLKPLACVLDEIDTGNLAGLRDYTLLLLMFSGALRRSEAARIEVDDLDFVGQGIRLRLKPSKHQLHETEIAMVPGKQYCPVSALARWLKQSRISEGALFRRMNRWGQLMQEPLGPQGINLMIKRRTGQAIDDLQVSGHSLRRGFITSAVTAGKPMNKIIEVTRHKDIRTLQEYFDDAHKFSDHALDGLL

SEQ ID NO: 1525 - protein, 329 aa, Aeromonas bestiarum
MQTVFDPQLNSRARRFLRSAKADSTLNAYQADTRIFVFWCQLHGLDPLQTTHHDIMNFLADQADGILADWVWLDKEEGKGELRNGEPRKPATLVRRLAGIRYAFKQKGIHPMPTEHAEIKEMMRGIVRLGDNRKRKTGALTLQPLARVLDEIDTSSLAGLRDHTLLLLMFSGALRRSEAARIEVSDLDFVGQGIRLRLKPSKHQLHETEIALIPGKQYCPVSALHSWLKKSRIGEGALFRRMNRWGQLMSEPLGPQGINLMIKRRTGQAIDDLYVSGHSLRRGFITSAVTAGKPMNKIIEVTRHKDMRTLQEYFDDAHKFSDHALDGLL

SEQ ID NO: 1526 - protein, 329 aa, Aeromonas tecta
MQAVFDPQLNSRARRFLRSAKADSTLNAYEADTRIFVYWCHLQQLDPLQTTHHDIMNFLADQADGILADWVWLDKQEGKGELRNGEPRKPATLVRRLAGIRYAFKQKGVHPMPTEHAEIKEMMRGIVRLGDNRKRKTGALTLQPLTQVLDEIDTNNLAGLRDHTLLLLMFSGALRRSEAARIEVSDLEFVGQGVRLRLKPSKHQLHETEIALIPGKHHCPVRALQNWLKKSRISEGPLFRRMNRWGQLMPDPLGPQGINLMIKRRTGQVIDSLYVSGHSLRRGFITSAVTAGKPMNKIIEVTRHKDMRTLQEYFDDAHKFSDHALDGLL

SEQ ID NO: 1527 - protein, 329 aa, Aeromonas sp. 62-46
MQSIFDPQLNSRARRFLRSAKADSTLNAYQADTRIFVSWCQLHGLDPLQTTHHDIMNFLADQADGILANWVWLDKEEGKGELRNGEPRKPATLVRRLAGIRYAFKQKGIHPMPTEHAEIKEMMRGIVRLGNNRKRKTGALTLKPLACVLDEIDTSNLAGLRDYTLLLLMFSGALRRSEAARIEVNDVQFVGQGIRLCLKPSKHQLHESEIALIPGTRYCPVSALQQWLKKSRIAEGPLFRRMNRWGQLMTDPLGPQGINLMIKRRTGQAIDDLHVSGHSLRRGFITSAVTAGKPMNKIIEVTRHKDMRTLQEYFDDAHKFSDHALDGLL

SEQ ID NO: 1528 - protein, 326 aa, Aeromonas encheleia
MFDPALNNRARRFLRSAKADSTLNAYQADTRIFVFWCQLHGLDPLQTSHHDIMNFLADQADGILADWVWLDREEGKGELRNGEPRKPATLVRRLAGIRYAFKQKGIHPMPTEHAEIKEMMRGIVRLGDNRKRKTGALTLQPLTRVLDEIDTSNLAGLRDHTLLLLMFSGALRRSEAARIEVSDLDFVGQGIRLRLKPSKHQLHETEIALIPGKQHCPVSALSRWLKASRLSQGPLFRRMTRWGQLTADPLGPQGINLMIKRRTGQAIDDLYVSGHSLRRGFITSAVTAGKPMNKIIEVTRHKDMRTLQEYFDDAHKFSDHALEGLL

SEQ ID NO: 1529 - protein, 313 aa, Aeromonas fluvialis
MRSAKADSTLNAYQADTRIFVFWCQLHGLDPLQTTHHDIMNFLADQADGVLADWVWLDKEEGKGELRNGEPRKPATLVRRLAGIRYAFKQKGIHPMPTEHPEIKEMMRGIVRLGDNRKRKTGALTLQPLTQVLDGIDISDLAGLRDHTLLLLMFSGALRRSEAARIEVSDLDFVGQGIRLRLKPSKHQLHETEIALIPGKHYCPVSALQNWLRKSRISEGPLFRRMNRWGQLMAEPLGPQGINLMIKRRTGQTIDDLYVSGHSLRRGFITSAVTAGKPMNKIIEVTRHKDMRTLQEYFDDAHKFSDHALDGLL

SEQ ID NO: 1530 - protein, 313 aa, Aeromonas veronii
MRSAKADSTLNAYQADTRIFVFWCQLHGLDPLQTTHHDIMNFLADQADGVLADWVWLDKEEGKGELRNGEPRKPATLVRRLAGIRYAFKQKGIHPMPTEHPEIKEMMRGIVRLGDNRKRKTGALTLQPLTQVLDGIDTGDLAGLRDHTLLLLMFSGALRRSEAARIEVSDLDFLGQGLRLRLKPSKHQLHETEIALIPGKHYCPVSALQNWLHKSRISEGPLFRRMNRWGQLMAEPLGPQGINLMIKRRTGQTIDDLYVSGHSLRRGFITSAVTAGKPMNKIIEVTRHKDMRTLQEYFDDAHKFSDHALDGLL

SEQ ID NO: 1531 - protein, 313 aa, Aeromonas veronii AMC35
MRSAKADSTLNAYQADTRIFVFWCQLHGLDPLQTTHHDIMNFLADQADGVLADWVWLDKEEGKGELRNGEPRKPATLVRRLAGIRYAFKQKGIHPMPTEHPEIKEMMRGIVRLGDNRKRKTGALTLQPLTQVLDGIDTGDLAGLRDHTLLLLMFSGALRRSEAARIEVSDLDFVGQGIRLRLKPSKHQLHETEIALILGKHYCPVSALQKWLHKSRISEGPLFRRMNRWGQLLAEPLGPQGINLMIKRRTGQTIDDLYVSGHSLRRGFITSAVTAGKPMNKIIEVTRHKDMRTLQEYFDDAHKFSDHALDGLL

SEQ ID NO: 1532 - protein, 313 aa, Aeromonas veronii
MRSAKADSTLNAYQTDTRIFVFWCQLHELEPLKTTHHDIMNFLADQADGVLADWVWLDKDEGKGELRNGEPRKPATLVRRLAGIRYAFKQKGIHPMPTEHPEIKEMMRGIVRLGDNRKRKTGALTLQPLTQVLDGIDTGDLAGLRDHTLLLLMFSGALRRSEAARIEVSDLDFVGQGIRLRLKPSKHQLHETEIALIPGKHYCPVSALQKWLHKSRISEGPLFRRMNRWGQLMAEPLGPQGINLMIKRRTGQTIDDLYVSGHSLRRGFITSAVTAGKPMNKIIEVTRHKDMRTLQEYFDDAHKFSDHALDGLL

SEQ ID NO: 1533 - protein, 313 aa, Aeromonas veronii AER397
MRSAKADSTLNAYQADTRIFVFWCQLHGLDPLQTTHHDIMNFLADQADGVLANWVWLDKEEGKGELRNGEPRKPATLVRRLAGIRYAFKQKGIHPMPTEHPEIKEMMRGIVRLGDNRKRKTGALTLQPLTQVLDGIDTGDLAGLRDHTLLLLMFSGALRRSEAARIEVSDLDFVGQGIRLRLKPSKHQLHETEIALIPGKQYCPVSALQNWLHKSRISEGPLFRRMNRWGQLMAEPLGPQGINLMIKRRTGQTIDDLYVSGHSLRRGFITSAVTAGKPMNKIIEVTRHKDMRTLQEYFDDAHKFSDHALDGLL

SEQ ID NO: 1534 - protein, 313 aa, Aeromonas hydrophila
MRSAKADSTLNAYQADTRIFVFWCQLHGLDPLQTTHHHIMNFLADQADGILADWVWLDKEEGKGELRNGEPRKPATLVRRLAGIRYAFKQKGIHPMPTEHAEIKEMMRGIVRLGDNRKRKTGALTLKPLACVLDEIDTGNLAGLRDYTLLLLMFSGALRRSEAARIEVDDLDFVGQGIRLRLKPSKHQLHETEIALVPGKQYCPVSALARWLKQSRISEGALFRRMNRWGQLMQEPLGPQGINLMIKRRTGQAIDDLQVSGHSLRRGFITSAVTAGKPMNKIIEVTRHKDIRTLQEYFDDAHKFSDHALDGLL

SEQ ID NO: 1535 - protein, 281 aa, Aeromonas salmonicida subsp. salmonicida 01-B526
MRSAKAVSTLNAYQADTRIFVFWCQLHGLDPLQTTHHDIMNFLADQADGILADWVWLDKEEGKGELRNGEPRKPATLVRRLAGIRYAFKQKGIHPMPTEHAEIKEMMRGIVRLGDNRKRKTGALTLQPLGRVLDEIDTSNLAGLRDHTLLLLMFSGALRRSEAARIEVSDLDFVGQGIRLRLKPSKHQLHETEIALIPGKQYCPVSALHTWLKKSRIGEGALFRRMNRWGQLMSEPLGPQGINLMIKRRTGHRRSLCQWPQPATGIHHLGRHRRQAHEQDH

SEQ ID NO: 1536 - protein, 405 aa, Xenorhabdus doucetiae
MAAELNKLSDKKLKNLHGKERDNIEFFADGAGLSAKASKVGGISWVFTYRLDGKKLNRLTIGRYPDMSLKLARDMRDKCRNWLASGKDPKLQFDLTMQESLKPVTVKEAMEYWIENYAKDSRENIDKHVSQLKKHIYPYIGNMALADCETRYWLQCFDRTKKTAPVGAGYILQMCKQALKFCRVRRFAISNALDDLTISDVGRKQSKGKRYLEDNELSQLWQSLNTNMYLPYYSNLLRILIVFGCRSQEARLSKWSEWDFDSMLWTVPKENSKSDDKIIRPIPECLKPFLEKLIYQNHKSGYLLGELKSPESVSQCGRNIWRRLEHGEEWSLHDLRRTFATKLNDMGIAPHIVEQLLGHALPGIMAIYNKSQYLPEKLDALNKWCERLDVLAGNYENVVILKAVQ

SEQ ID NO: 1537 - protein, 260 aa, Escherichia coli
MQHLPAPIHHARDIAQLPVAIDYPAALALRQMSMVHDELPKYLLAPEVSALLHYVPDLRRKMLLATLWNTGARINEALALTRGDFSLTPPYPFVQLATLKQRTEKAARTAGRMPAGQQTHRLVPLSDTWYVSQLQTMVATLKIPMERRNKRTGRTEKARIWEVTDRTVRTWIGEAVAAAAADGVTFSVPVTPHTFRHSYAMHMLYAGIPLKVLQSLMGHKSISSTEVYTKVFALDVAARHRVQFLMPESDAVTMLKNRQA

SEQ ID NO: 1538 - protein, 317 aa, Nocardia farcinica
MLSSGITVRAAGDGFLDSIRSPNTRRSYAIAVDKTTARLGEARPLANVADDEIGETLETLWGEAAVNTWNARRAAVASWLAWCREHGHLAPAVPAWVKRSTPPDSATPVRSRTAIDRLITRRDIDLRDKTLWRMLYETCARTEELLQVNIEDLDLAGRCCPVKSKGAKPRTRRRGAAHHEYAHELVYWDAGTARLLPRLTKGRTRGPLFVTHRRPGPRKAVADRDICPHTGLARLSYGQARALLDAATATNGPGTGWDLHELRHSGLTHLGEAGASLLELMAKSRHRKPDNLRRYFKPSPAAMRGITSLLGPDRGHR

SEQ ID NO: 1539 - protein, 338 aa, Serratia symbiotica
MTGKRKNSDDNWMPPRVYRGRSAYEFKHHNGSVIRLCSLDCTQSVVWAEYEKYIEQQKDNDTFKKLVGRFLISAEFTDLAFETQKDYHKYARKLIPVFGDVQPNDIRPEHVQRYMDKRGLKSKTQANREKTFMSRVFGWGYERGYVKGNPCKGVRQYKEKSRERYITDAEYAAVFAAAPDMVRAVMELAYLCCARQRDVLALTRNQILEDGIYICQGKTGAKQIKAWSDRLRAAVALADSVPISTGIASAYVIHQQNGNRYTRDGFNSKWRNAKLAAKAANPAMNIDFTFHDLKAKGISDLEGSLVEKQAISGHKNSSQTAIYDRKVKIVPVVGNQKK

SEQ ID NO: 1540 - protein, 326 aa, Negativicoccus massiliensis
MAKHFYLRDNQRIQNNSLLSSGSKELFTLEKSHSTIDAYESDWSDFCDWCNYRGIYFFPATPETIVNYIHDLSAYAKANTIARRVSALSENFTAGGLIKDNPCLSPLVKAAMKGIRRKIGTYQQGKSPLLKEDLEAIVQMMDIKDLTQHLDKTVLVIGFMGAFRRSELSSIRYEDVHFVRQGIEIFIPRSKADQEGEGNIVALPNLTQKELCPVTTLKSWLSRTKITSGPVFRSPTKTGKLRKNALSDQMVNRIVKRWAEKIGLDPADYGAHSLRHGFATSAALAGIEERRIMQQTRHHSVEMVRHYINEADRFEHNPLRDMFSAK

SEQ ID NO: 1541 - protein, 326 aa, Negativicoccus succinicivorans DORA_17_25
MAKHFYLRDNQRIQNNSLLSSGSKELFTLEKSHSTIDAYESDWSDFCDWCSYRGIHYFPATPETIVNYIHDLSAYAKANTIARRVSALSENFTAGGLIKDNPCLSPLVKAAMKGIRRKIGTYQQGKSPLLKEDLEAIVQMMDIKDLTQHLDKTVLVIGFMGAFRRSELSSIRYEDVHFVRQGIEIFIPRSKADQEGEGNIVALPNLTQKELCPVTTLKSWLSRTKITSGPVFRSPTKTGKLRKNALSDQMVNRIVKRWAEKIGLDPADYGAHSLRHGFATSAALAGIEERRIMQQTRHHSVEMVRHYINEADRFEHNPLRDMFSSK

SEQ ID NO: 1542 - protein, 330 aa, Comamonas sp. 26
MSNKHSTISVAGKSHTRKTVKNITNRITKNKIVKSGSVQEYMDASQAGATKRAYGSDLRHFLAHGGAMPCTPKRLAKYLAESANDGLAVATLERRVTAIHKAHVDQKHGSPAHSEIVRQVMQGIRRTLGTKQRQVKPLTKDDLLPALETIESVHMPVRAARDRAILLIGFASAMRRSELVGVCVEHLTFSPAGLEIELPVSKTDQEQHGRTVFIPRANGSHCPVTALMCWLKTAGIRTGHVFRSVNRYDGIATQGLTPQSVALIVKGAMAQAGADARIFSGHSLRAGYCTTAAEQGLPSWQIRMQTGHKSDVTLARYIRKSDWQKAQSLL

SEQ ID NO: 1543 - protein, 369 aa, Thioclava sp. SK-1
MPSETEKSTSAPSAEHEVSRGDDRGHKESTSIALPAHVAGSGALDRLVDTARAYARAAASDNTLRAYAKDWAHFTRWCRMKGTDPLPPSPDIIGLYLADLASGSGALPSASRPLSVSTIERRLSGLTWNCAQRGFSLDRKNRHIAAVLAGIRRKHARPPVQKAAILAEDIVAMVATLPYDLRGLRDRAILFLGYAGGLRRSEIVSLDVHKDDTPESGGWIEILDKGALLTLNAKTGWREVEIGRGSTDQTCPVHALEQWLHFAKIDFGPVFVSTSRDGKCAYETRLNDKHVARLIKRTVLHAGIRPDLPETERLALFSGHSLRAGLASSAEVDERHVQKHLGHASAEMTRRYQRRRDRFRVNLTKAAGL

SEQ ID NO: 1544 - protein, 261 aa, Pantoea stewartii
MMTASLPSLPGEYFQHTSRLPVAIDYPAALALRQMAAQLDDYPKYLLAPEVSALLHYIPDLYRKTLVDTLWNSGARINEALALGRTDFLLQPPYPFVQLATLKQRTEKSARTAGRAPAGSQAHRLVPLSDVNYVSQLEMMVATLKIPLERRNKRTGRTEKARIWEVTDRTVRTWLAEAVDAAAADGVTFSVPVTPHTFRHSYAMHMLYNGIPLKVLQSLLGHRSISSTEIYTKVFALDVAARHRVQFHMPGADAVAMIKGC

SEQ ID NO: 1545 - protein, 317 aa, Paraburkholderia sp. BL21I4N1
MPNRLMPIARTDRRQLTAAEFHQLANVPPEAEWFGNLDNPRTRRAYQVDLRDFMAFIGIARPDEFRTVTRAHVLAWRKHLEARQLSGATIRRKLAALSSLFDYLCERNAVSLNPVAGVKRPKNNGNEGKTPALGDHQARALLDAPDPVTLKGKRDRAMLAVLLYHGLRREELCLLKVRDIHDRRGTPHLRIHGKGSKLRYVPLHPASAERLHTYLESAGHDTVPDAPLFQPIRKTGTAITADGVYKCVLAWAVHAKIAVEGFGVHSLRATAATNALDHEADIAKVQEWLGHANIATTRLYDRRKQRPEDSPTFKVAY

SEQ ID NO: 1546 - protein, 312 aa, Paraburkholderia sp. BL21I4N1
MPIARTDRRQLTAAEFHQLANVPPEAEWFGNLDNPRTRRAYQVDLRDFMAFIGIARPDEFRTVTRAHVLAWRKHLEARQLSGATIRRKLAALSSLFDYLCERNAVSLNPVAGVKRPKNNGNEGKTPALGDHQARALLDAPDPVTLKGKRDRAMLAVLLYHGLRREELCLLKVRDIHDRRGTPHLRIHGKGSKLRYVPLHPASAERLHTYLESAGHDTVPDAPLFQPIRKTGTAITADGVYKCVLAWAVHAKIAVEGFGVHSLRATAATNALDHEADIAKVQEWLGHANIATTRLYDRRKQRPEDSPTFKVAY

SEQ ID NO: 1547 - protein, 301 aa, Pseudomonas putida S11
MSDAERYQQAARRASTARRYAQAIEHFEGEWGGLLPASSASVVRYLAAFGPQLSASTLRTHLAALAQWHQRRGFVDPTKAAQVRDTLRGIQALHPQPVKQAPALQLKVLEASIEGLSADLHSALPVLRLRAARDQALILLGFWRAFRGDELCRLQAEHVRIEAGEGMQLFLPSSKTDRDNRGRNLTMPALKRLCPVQATEQWLLLSGIEQGPLFRGIDRWGHINAQPLNANSVSRLLRRALLRSGIEAEGYSAHSLRRGFATWASRNQWSTEALMAYVGWRDVQSAARYIESHAPFGEWAR

SEQ ID NO: 1548 - protein, 339 aa, Exiguobacterium sp. RIT341
MEEEMRNEVEIREAAALAFADSRERLLAVLEDDHLNMEALSDLEIFELFWATELFPIYSQKSPHTKRAYKQDLDYILRFFVTKTQGVKQLTILNLHEYLKDVHDQYAPRTVKRRNAMLRRFLRFLHVNDYHARDLSLQVKDQMKPEPLRREIDFDEMEAIALAFRHTVKQKKNRELLQLRNETMGYLLLTTGMRASELLSLQFNQIYQSKEFNYIEIKGKREKWRRIPLSEKTYYLLKYLNEKLISENILNPYVCFNINSTFSSITYETLRLITHEAAKVMGSEGNTPHWFRRSFITKMLTNNSPLIEVMKLSGHESITTTNKYLQDLKNERTINLPYN

SEQ ID NO: 1549 - protein, 495 aa, Dorea formicigenerans
MNYVKIYTKTYRDNSARYIELPSLLIEQDGETKVFEQLLKYQIKYSHKSKTWHNKLIQSVSLLFDYMNANPNNYVSAKDFFELFAEAIYSGTIDEEGNDPSGLYWLPKKAQTANTLLSSLSDFSDWLYINYKTEQLNPWREATRYEERLKYMALINRSERSFLGHLDDIHDISETAKTVRNVVTHKNPYAVRNGTKAFPEDKIEKLLREGFKKTRKGYELDLIDGYNWRDIAITILMHYGGLRHSEPFHLWVQDVIPDPEDPDMAIVRIYHPSEGKAPHDFKNPSTGKYVTDRASYLKLKYGLIPRNQYASSNKRFAGWKNPRLDDEDNMYMNVYWFPREAGYVFMYVWKKYLQQRIRYGIKDTHPFAFVSFDPRYLGEMMPPRTQTEAHNKACESIGLEISKFNGTTNHGHRHAYGQRMKNAGIDKKVRQVAMHHKSEESQNVYTEPTVTEVTNALSLATYSLNKGIALPMKSEISSWYEEEKKLAKKYMMRKK

SEQ ID NO: 1550 - protein, 388 aa, Enterococcus hirae
MAQIKPYKKQDGTINYMFDFYVGINPKTGKKQKTTRRGFKTEEEASLALAELSLLVATEQYVPKKHHTFNEIFTLWYKQYCNLVKESTAVTAKCEFKYAILPKFQEMRIQDITPIYCQQIVNEWYKDKPKRASRFIYYFNRVMEHAMFLELIYQNPMANVKKTVTNLNLNHYEEFSNFFTKEELIEFLRFTKENFDSERYAFFRTLAFTGLRKGEAFALTWEDVNFDEKYLEVTKTVAKGDRNKILIHPPKTKAGFRRISLDNATLESLKTWREKQAIKFGLPKINPNQIIFSNYKNTYLESGITKEWFLTIQRLYRKKTGKEIKTITMHGFRHTHASLLYKANIPIKEAQERLGHSNVKTTLNIYTHLSKDQRDKTANRFAEFMNEI

SEQ ID NO: 1551 - protein, 380 aa, Enterococcus villorum
MAKFEQYKKKNGEKAWKFQAYLGINPETGKPVKTTRRNFKTQREAKLALARLQSEYEDNLLKNDKPKTYKDVYDLWMTEYKRTVRGSTLLKTERIFKNHVLEELGDIYISEITPIKIQKLMDKWANKYDTAPKMMNYTGLVFKYAVRFGIIESNPTDAIRKPKRRKKATVEEPFYDKKQLKLFLDELYNQPNLKIQAFFRLLAMTGMRKQEAGALEWRDIDFKAKTVNIYKAVTRTANGLEIDTTKTVGSSRIISIDQGTLDKLLEWKEAVLPPSDEWLVFGHSSAKNPHDIMSLDTSRKWLLNIQDQMDKKQKKKLPRITVHGFRHTQASLLIEMGASLKEVQFRLGHEDIQTTMNTYAHVSKLAKEQLADKFNKFIDL

SEQ ID NO: 1552 - protein, 365 aa, Alphaproteobacteria bacterium HGW-Alphaproteobacteria-16
MVDRRTVDLVVQDVRGLVGPAVLLDTELVAAAVRGWSHNTRRAFRSDLCLWGDWCRRQRVAPASADAGVVAAWIRALAGMDPSGETVRAMATIERYVVNVGWAYRMAGLDDPTAAPLVRLEKKAARKHLGVRQRQARAIRFKGDIADFDSPASGVCLAHLLKACRRDLLGFRDEALLRTAYDSAGRRSELVAIDVDHIEGPDGQGAGTLFIPTSKTDRQGEGAYAYLAPSTMTAIARWREAGHIDRGALFRRVETHFDGSVAGVGRAALHPNSITLIYKRLIRAAHAKKLLGAMGEAELERWVSAVSSHSIRVGVAQDNFAADESLPAIMQAYRWRDPRTVMRYGAKLAPKSGASARMAKRFSES

SEQ ID NO: 1553 - protein, 318 aa, alpha proteobacterium HIMB5
MSNLTTDLKAIQEETLLNLKASKSNNTIRAYKSDFHDFGLFCVKNGFKSLPSNPKTVSLYLTYLATKNMKISTIKRRLVSIAVVHKMKGHYLDNKHPSIIENLLGIKRRKGIKQKGKKPLLINNLKQIINVIDENNSSEIKIYRDRSIILLGFGGGFRRNELVSLNFDDLDFVNEGLKVSIRKSKTDQYGEGSIKALPYFDNPQYCPVKSLQKWLEISKIKEEAIFRKFHKGTKISNIRLSDQSVALLIKYYLNKAGIDSSDYSGHSLRSGFATSAAEAGAEERSIMEMTGHKSTEMVRRYIKEANLFKNNALNKIKL

SEQ ID NO: 1554 - protein, 389 aa, Mesorhizobium sp.
MRGIRTISNSADVLRRAEALDALDAVLPFDRREFLAEILSDDDVETLRHLAREGIGENSMRALASDLAYLEAWCRAATSDPLPWPAPEALLLKFLAHHLWDPARRETDPTHGMPADVSAALMQAGLLRAKGPHSPSTVRRRLSSWSTLTQWRGLQGKFNAPRLRNATKLAVRASLRPRHRKSAKAVTADVLGALLKACAGDRLVDVRDRALLMVAFASGGRRRSEVSSLRIAQLMEQDPVPADPDNPHSALLPCVSIHLGRTKTTEADDSAFVLLIGRPVAALDDWLARAGITEGAVFRRIDRWGHLERRALTPQAVNLILKRRILQCGLDPQEFSAHGLRAGFLTEAARRGIPLPEAMQQSQHRSVQQASRYYNDAERRHGKAARLIV

SEQ ID NO: 1555 - protein, 388 aa, Sinorhizobium meliloti
MAKTPPSPSEDVHRRAEELDALDAILPFDRRDQLAALLTDDDVETLKHLASEGMGENTLRALASDLGYLEAWCRLATGAPLPWPAPEALLLKFVAHHLWDPVKRAEDPAHGMPADVEAGLRAERLLRSPGPHAPGTVQRRLTSWSILTRWRGLTGAFAAPSLKSTLRLAVRASARPRQRKSKKAVTVDILAKLLQACAGDRLVDLRDHALLLTAFASGGRRRSEVAALRVEDLTDEEPVRADPSDKNSPPLPCLSIRLGRTKTTTADENEHVLLIGRPVAALKTWLAEAQIKDGPVFRRIDQWGNIDRRALTPQSVNLILKARCEQAGLDPALFSAHGLRSGYLTEAANRGIPLPEAMQQSLHKSVTQAASYYNNAERKNGRAARLIV

SEQ ID NO: 1556 - protein, 386 aa, Rhizobiales bacterium
MAKTTPSDAIHRRAEELDALDSILPFDRRDQLASLLTDDDVVTLKHLAGEGMGDNTLRALASDLGYLEAWCQLAIGGPLPWPAPESLLLKFVAHHLWDPVKRAEDADHGMPADVEAGLRDSRLLRAKGPHAPDTVRRRLTSWSVLTRWRGLTGAFNGPSLKSALRLAVRASARPRQRKSKKAVTADILAKLLQACAGERLVDLRDRALLLTAFASGGRRRSEIAGLRVADLVDEEAVRADPNDANSPRLPCLSIRLGRTKTTTSDDDEHVVLIGRPVVALKHWFEQANVKDGPVFRRIDQWGNIDRRALTPQSVNLILKTRCKQAGLDPALFSAHGLRSGYLTEAANRGIPLPEAMQQSLHKSVTQAARYYNDSERKQGRAARLMI

SEQ ID NO: 1557 - protein, 391 aa, Sinorhizobium fredii
MIKQHRTADSNSQALHRRAEELDALDAILPFDRRDQLAALLTDDDVATLKHLASEGMGGNTLKALASDLGYLEAWCRLATGSPLPWPAPEALLLKFVAHHLWDPVKRAEEPAHGMPADVEAGLRCEGLLRAKGPHAPGTVRRRLTSWSILTRWRGLSGAFGAPSLKSALRLAVKASSRPRQRKSKNAVTGDVLAKLLATCAGDRLVNRRDMALLLTAFASGGRRRSEVAGLRVEDLNDDEPVHADPADKTSPPLPCLSIRLGRTKTTTSDDDEHVLLIGRPVAALKRWLEDAGIKDGPVFRRIDQWGNVDRRALTPQSINLILKTRCKQAGLDPVLFSAHGLRSGYLTEAANRGIPLPEAMQQSLHKSVTQAASYYNNAERKNGRAARLII

SEQ ID NO: 1558 - protein, 370 aa, Rhizobiales bacterium
MPGSPASPPKIGDLAVARINGGQPDIAEPDMETGAAAPATLISARLEALVETATGYAKAASSENTRAAYAKDWRHFSSWCRREGLEPLPPSSQVIGLYISACAAGEPKRGLPSLSVATIERRLSGLGWNFNQRGQPMDRADRHISTVLAGIRRKHAKPPRQKEAVLGDDLLAMIATLGHDLRGLRDRAILLLGFAGGLRRSEIVGLDVVRDENSDGAGWIEIYADKGVLVTLRGKTGWREVEVGRGSSDHTCPVVALETWVRFGRIARGPLFRRIFKDNKTVDVERLSDKHVARLVKQTALEAGVRSDLPEGERALLFAGHSLRSGLASSAEIEERYVQKHLGHASAEMTRKYQRRRDRFRTNLTKASGL

SEQ ID NO: 1559 - protein, 365 aa, Roseovarius sp.
MDSETEKSTSAPSGAVDDARGDESEQEAPNSIALPAHVAGSGTLDRLVDTARDYARAAASENTLKAYAKDWAHFARWCRMKGAEPLPPSPEMIGLYLADLASGSGPSPALAVSTIDRRLSGLAWNYAQRGFTLDRENRHIATVLAGIKRKHARPPVQKAAILAEDILAMVATLPFDLRGLRDRAILLIGYAGGLRRSEIVSLDVGKDDTPDSGGWVEILEKGALLTLNAKTGWREVEIGRGSKKQSCPVHALEQWLHFARIDFGPVFVGTSRDGKRASETRLNDKHVARLIKRTALGAGIRADLPEKDRLALFSGHSLRAGLASSAEVDERYVQKQLGHASAEMTRRYQRRRDRFRVNLTKAAGL

SEQ ID NO: 1560 - protein, 371 aa, Sulfitobacter pseudonitzschiae
MPSETEKSTSAPSDTNKDAPLDERDQKESDSIALPTHVAGSGTLDRLVYTARDYARAAASENTLKAYAKDWAHFARWLRMKGADPLPPSPEMIGLYLADLASGSGPSASQSASRPLSVSTIERRLSGLAWNYTQRGFTLDRNNRHVATVLAGIKRKHARPPVQKEAILAEDILVMVATLPYDLRGLRDRAILLLGYAGGLRRSEIVSLDVHKDDTPDSGGWIEIFDKGALLTLNAKTGWREVEIGRGSKDQTCPVHALERWLHFAKIDFGPVFVGSSRDGKRPSDTRLNDKHVARLIKRTVLNAGIRSELPEKERLALFSGHSLRAGLASSAEVDERYVQKHLGHASAEMTRRYQRRRDRFRVNLTKAAGL

SEQ ID NO: 1561 - protein, 363 aa, Mesorhizobium sp. LSHC420B00
MPDIVDVVDIISTEMGRGEASDEAPFHALRPAPGLPAHLERLADRARDYVDAASSANTRRAYASDWKHFCAWARRQHLEVLPPDPQTVGLYITACASGKVTGDKKPNSVATIERRLSSLAWNYTQRGEPLDRKDRHIATVLAGIRKSHAKPSVQKEAILPEDLIAMLQTLDRGTLRGLRDRAMLLLGFAGGLRRSEIVGLDVGRDQTDDGRGWVEILDKGALVTLRGKTGWREVEIGRGSADATCPVVALQTWLKLARIAHGPLFRRVTGQGKAVGAERLNDQEVARLVKRAALATGVRGDLSEGERQQKFAGHSLRAGLASSAEVDERYVQKQLGHASAEMTRKYQRRRDRFRVNLTKASGL

SEQ ID NO: 1562 - protein, 294 aa, Anaerotignum propionicum
MERAVNEFASYLRNDKHSSENTVLSYIRDLRGFTEFMRVCGVSDALMVNYTNVMSYIYELQSKKKAGATVSRNIASIRAFYNYLIRQGAITDNPAANLELPKIEKKMPGILTLDKVEQLLEQPQGVDPKGIRDKAMLELLYATGIRVSELISLKVSDVNLPLEYIRCGVERKSRIIPIGSQAKAALRKYIEKGRSRMILADDEEMLFVNCNGKPMTRQGFWKIIKCYAKKAGIDEEITPHMLRHSFAAHLIENGADLKSVQEMLGHSDISSTQIYVKLTNQKLKSVYAKAHPRA

SEQ ID NO: 1563 - protein, 462 aa, Streptomyces sp. KE1
MRRTVLTYDVRVYSIETRKDRPKPYRLHWLVGDRKHSKSYTLRAQADGRRSELMTAARKGEQFDRDTGLPVSELRAQRGSVTWYQHTRAYIDRKWAAAPAKSRKNYADALATITPALVKAAKGRPDAALLRAALYGWAYNRNRWDLTPPEEIAAALAWVQKNSLPVSELEEAKTVRAALDALSLKLDGTPAAPRTARRKRACLSEVLGLAVEEKYFTVPVNPITTVKWTPPKSVEEVDPDSVANPRQVRALLRAVREQGPRGAHLEAFFGCLYYASMRPAEATALTLAQCHLPASGWGTLTLRKGAVRAGRGWTNDGSAHEARHLKARAEKDSRPVPIPQHFVRQLRQHVAVHGTAPDGRLFRTNRGGLLQETGYGEVWAAARQSALTEPEAASLLARRPYDLRHAGVSFWLSSGVDPMECARRAGHSVAVLLRVYAKVLARTQERANKRIEEAMRAWNEPE

SEQ ID NO: 1564 - protein, 309 aa, Actinobacillus minor
MKKSTLSQQLFSQYFSDWVATYKEGAIRLVTMKKYRSTLHWIETLAPKLRVGDLSRITYQKLLNDYAQTHERQTTMDFHHQLKGAILDAVDEGLLDTDPTRKAIIKGKAPKSKKIKYLNQFELQALLNSLELEQKINWDWFILLVAKTGMRFSEALAITPEDFDFAHQTLQVNKTWNYKEKGGFSPTKNRSSIRKIQLDWQTVIQFSQLIKDLPPDKPIFPCDTAIYNSTINGMLARICRKAKVSTISIHGLRHTHASLLLFAGVSIASVARRLGHSSMTTTQHTYLHIIQELENQDTDIVMRHLAGLC

SEQ ID NO: 1565 - protein, 356 aa, Unknown
  source: /note="Description of Unknown: Bacteria sequence"
MKREILLERIDKLKQIMPWYVLEYYQSKLAVPYSFTTLYEYLKEYDRFFSWVLESGISNADKMSDIPLSVLENMSKKDMEAFILYLRERPLLNANTTKQGVSQTTINRTLSALSSLYKYLTEEVENDLGEPYFYRNVMKKVSTKKKKETLAARAENIKQKLFLGDETEGFLTYIDQEYPQQLSNRALSSFNKNKERDLAIIALLLASGVRLSEAVNLDLRDLNLKMMVIDVTRKGGKRDSVNVAAFAKPYLENYLAIRNQRYKTEKTDTALFLTLYRGVPNRIDASSVEKMVAKYSEDFKVRVTPHKLRHTLATRLYDATKSQVLVSHQLGHASTQVTDLYTHIVNDEQKNALDSL

SEQ ID NO: 1566 - protein, 286 aa, Anabaena cylindrica
MLINRNGQAKVLTKSEIQQLFHNGFKSSRDKALFAVAFYTACRISEARKMFIIDAFYDGKVRDEIIIRKAHSKGKQGTRSIPTHPNLKKILQEYYDNSAKLVEMKKMIGDWSEKSFNCEGKIIINLAHQCPRCQFAGIFKNGVCNNQQRYKCKKCRHEFFERELPKTDLASENSSAIEFDPLGVTCSTLYGFLLEKSDNPFLFPGRRSKGYISLRNAMSIFVYAFDKLGIDGASTHSCRRTALTMMHREGVILKVLQEISGHKDLGALQKYLEVSEEQARAAINIL

SEQ ID NO: 1567 - protein, 350 aa, Hymenobacter lapidarius
MSEDLSIVPASNATPTVSTQLARASAKVAGFLETGLQGAANTERAYTSDLKSYGAFCEHHGFVALPADVETLTEYVAFLATEKPEPTLGDGREKKKGQQPLTRPHSLATIKRHLAAIRKAHQLAGHRLPATLDALNIVMEGIARTLGKRQDQAQAFTVEELKQAILRIDLETSAGLRDRALLLLGFSGAFRRSELVDLNIEQLEFTERALLVHLAKSKTNQYGAVEDKAIFYAPNADFCPVRCLRTWLNLLGWTTGPLFVKIPRAAPGQMAAPSDKRLSDISINKLVQKRLGPAYSAHSLRVSFVTVAVLNGQSHKAIKNQTKQKTDAMIERYTQLNNVVSYNAAQALGL

SEQ ID NO: 1568 - protein, 420 aa, Unknown
  source: /note="Description of Unknown: Enterobacterales sequence"
MSLTDAKIRTLKPSDKPFKVSDSHGLYLLVKPGGSRHWYLKYRISGKESRIALGAYPAISLSDARQQREGIRKMLALNINPVQQRAAERGSRTPEKVFKNVALAWHKSNRKWSQNTADRLLASLNNHIFPVIGNLPVSELKPRHFIDLLKGIEEKGLLEVASRTRQHLSNIMRHAVHQELIDTNPAANLGGVTTPPVRRHYPALPLERLPELLERIGAYHQGRELTRHAVLLMLHVFIRSSELRFARWSEIDFTNRVWTIPATREPIIGVRYSGRGAKMRMPHIVPLSEQSIAILKQIKDITGNNELIFPGDHNPYKPMCENTVNKALRVMGYDTKKDICGHGFRAMACSALMESGLWAKDAVERQMSHQERNTVRMAYIHKAEHLEARKAMMQWWSDYLEACRESYAPPYTIGKNKFIP

SEQ ID NO: 1569 - protein, 205 aa, Klebsiella aerogenes
MAISKGAKRTDGLESADQVKLVVEEIAKKSQTVADLFLLGVETQLRGVDMRSWRWVELDIGSKVLRITQDKTKEAVEVELTETAREVLKARYNERGENVYVFQNDSNRSKGKPISRSKIHAEIQYAVDKLKMRGLLPQDAVISMHSSRKTIASIAHAQGEDLEVISKMLGHRSTEHTRAYLGITQAKVDALRTKYSTGIKRVTLR

SEQ ID NO: 1570 - protein, 300 aa, Bacillus sp.
MEFVKDVLNSFLEYLQIEKNYSKYTVDCYEKDIGIFMSFMQEEQIQNLQSVTYADARLFLTRLYEKQYSKRSMSRKISCLRTFYRYLNREELVEDNPFALVTLPKKEERNPRFLYEEEIVKLFQMNDLTTPLGQRNQSLLELLYATGIRVSECASIKLSDIDFSLQTLLVYGKGKKQRYVPFGCYAKGALRVYIDNGRKLLLKKAPSDTHSLFLNYKGTPLTDRGIRLVIDQLVKKTAENIHISPHVLRHTFATHMLNEGADLRTVQEMLGHEHLSTTQIYTHVTKDRLKAVYMNHHPRA

SEQ ID NO: 1571 - protein, 283 aa, Bacillus sp.
MKKNSLEVIPLIDDFSQWLIESGKSDNTIKTYRAVLNQFHEWLLSEGRHLDQVTKNNVQTYMINLESNNKSASTIEKAFVTISVFARFLEKPEIVQNIERKRKEKNNEVVPQSLEASELDRLLSEVKQQGNLRDIAIVYTLLHTGVRVSEICALNHKDVEINKSDGFLIIRNAKGCKKRFVPLSTEARNSLKKYIDSLDSNHEALFVSNFDRRMSPRTVQYMLKKYNVNPHKLRHTFCHELVKKGIDIATVAELAGHSDVNVTKRYLKSSTRDLENAITQTFL

SEQ ID NO: 1572 - protein, 292 aa, Phycicoccus sp. Soil802
MLPRIGGLRLRELTTPVVDRFVLDVYQDVGAATARTCRSIVSGALSLAVRQGAIAANPARELERLEGTRAKEPRALTSEEQAKWFMGMTGDQVAVRQDLVDFSAFLLATGLRIGEALAVLWTEVDLDTGALTVTSTLIRVTGQGLLRKTTKSKAGQRALLLPTWCVAMLRRRSEVGVAPDEPIFATVDGRFRDPRNVSRQLADARDRLGFGWVTSHTWRKTMATILDGGGASPRMIADQLGHSRVSMSLDFYLGRRSVDPRVLAALEAVDPRRFTLESGGQSGGSVAQGEGT

SEQ ID NO: 1573 - protein, 495 aa, Achromobacter sp.
MTRYPKRGKGARWTVKELEAVPAEWAGDHLADGDGLTGEIRIQRGTMAVVWRYAYRLGDKVKRFYCGSWPERTLDEIRTARNKARADIKAGRNPSAVRDLEKAQAREAVAAESAAVTAAEEAATTDALSVREMYKSWLESGVKRADGNTEVMRIVEKDVLPLIGDTAVRSIREKDIERVIRSIVGRGCNRLAEVTFQILGQMFHWAEKRQPWRKLLSEGNPVELVELGVLLADDYDPDNVRERVLPPIEIVELQTRYRELEEQYLTSDDKRKRKPPSEALQAVSWICLSTLCRIGELHLTEIAHLDLREGTWFIPKANVKGRKSQKRDHLVFLSPFAIKHFETLVSLAGSSRWLLPSRDNDAEVDQPMYKQAFTKQIKDRQAMFNGKSKARRASDNSLVLGKGQSGNWTPHDLRRTGSTIMESLGIDPNIIDRCQNHAIHTGKNRVRRHYQLYDYADEKQAAWAKLGEYLERLLSGAMAPAELQKRLTTKQLLAA

SEQ ID NO: 1574 - protein, 296 aa, Enterococcus sp.
MDEQITEYLHYLSIERGLSDNTRISYQRDLHQYLSFLNDQGVTDWQAVDRYTVVAFLTSLTEAGKASTTITRMISSLRRFHQFLRQERYTDHDPMQHIDSPKKAQKLPQTLSLTEVERLIAAPDTTTDLGIRDRAILEVMYATGLRVSELIGLRLGDIHLEMGLLQTIGKGDKERIVPLGDYAIHWLERYLSEVRPLLTKKTPNEMFLFVNNHGHGMSRQGIWKNLKQYVIKAEITKDVTPHTLRHSFATHLLENGADLRTVQELLGHADISTTQIYTHITKRRMTEVYKEFFPRA

SEQ ID NO: 1575 - protein, 296 aa, Enterococcus sp.
MDEQITEYLHFLTIERGLSENTRVSYQRDLHQYLSFLSEQGVTEWQAVDRYIVVAFLANLTEAGKASTTITRMISSLRRFHQFLRQERYTDHDPMQHIDSPKKAQKLPQTLSLAEVERLIAAPDTTTDLGIRDRAILEVMYATGLRVSELIGLKLGDIHLEMGLLQTVGKGDKERIVPLGDYAIHWLERYLTEVRPLLTKKTPNVMFLFVNNHGHGMSRQGIWKNLKQYVIKAEIMKDVTPHTLRHSFATHLLENGADLRTVQELLGHADISTTQIYTHITKRRMTEVYKEFFPRA

SEQ ID NO: 1576 - protein, 296 aa, Enterococcus avium
MDEQITEYLHFLTIERGLSENTRVSYQRDLYQYLSFLSEQGVTEWQAVDRYIVVAFLANLTEAGKASTTITRMISSLRRFHQFLRQERYTDHDPMQHIDSPKKAQKLPQTLSLAEVGRLIAAPDTTTDLGIRDRAILEVMYATGLRVSELIGLKLGDIHLEMGLLQTVGKGDKERIVPLGDYAIHWLERYLTEVRPLLTKKTPNVMFLFVNNHGHGMSRQGIWKNLKQYVIKAEIMKDVTPHTLRHSFATHLLENGADLRTVQELLGHADISTTQIYTHITKRRMTEVYKEFFPRA

SEQ ID NO: 1577 - protein, 296 aa, Enterococcus sp. 3H8_DIV0648
MDEQITEYLHYLSIERGLSENTRISYQRDLQQYLSFLTDQGVSEWQAVDRYMVVSFLTNLTEAGKASTTITRMISSLRRFHQFLRQERYTDHDPMQHIDSPKKAQKLPQTLSLAEVERLIATPDTTTDLGIRDRAILEVMYATGLRVSELIGLRLGDIHLEMGLLQTVGKGDKERIVPLGDYAIHWLERYLAEVRPILTKKTPNETFLFVNNHGHGLSRQGIWKNLKQYVIKAEIMKDVTPHTLRHSFATHLLENGADLRTVQELLGHADISTTQIYTHITKRRMTEVYKEFFPRA

SEQ ID NO: 1578 - protein, 377 aa, Bacteriovorax sp. BAL6_X
MAIRCYEKDGKKLYQVYVNARSKTDRKLRVQKTVSDLKSLSLARREENRINQELGKKLTELEGLCDTWESVIDKWEHEARSGFLGTYNPATIMDHVASLRNWTKSWLKTPASELGKANGRDLVKRMTNAEKSISFIKKVKNTVNLVYNFGIEEGLIKGVHQSPVYGIKLHHKKEKVPDILTLEEIKQFLYEARRQEHPWYPIWATALLTGMRSGELYALEWNDVDFENEIVRVSKSFNKRTNEIKSTKAGYWRNVPMSPELKELFISLKSSSKDKFVLPRFNDWRRGDQSKILKMFLIGNGLPKIKFHALRACFATQLLAKGTPAAIVMKICGWRDLKTMELYIRVAGVDEKGATDCLSILPSEVDVADNVVSLFHS

SEQ ID NO: 1579 - protein, 318 aa, Deinococcus phoenicis
MTLIAQSTQAALDPIQLVLDSVTSPLTKAAYKKALTDFFVWWEEQGRPPLSKAVVQRHVALLVEQGLSPSSINVRLSALRKLVREAADNGLLGAFEAETIARVKGVKQQGRRSGTWLSKAQAQALLLAPDTTTLRGLRDRAILAVLLGCGLRRSELVGLTFAHLQQREGRWVILDLTGKHGRTRTVPMPAWCKAAVDAWTRTAGLSTGHVFRPTAPRGEHVLARQRLSHEAVALIVRKYGRQLGHNHLTPEDLEGVRLAPHDLRRTFAKLAHKGGAPIDQIQLSLGHASIQTTEVYLGVDQDLESAPCDVLGLSLKGG

SEQ ID NO: 1580 - protein, 311 aa, Methylobacterium sp. UNC300MFChir4.1
MTLPATLAARARAFADEALSENSRRAYRADWQHYARWCGGHDLAPLPAGPEQVASYLTSMAETHKRATIERRLVTIGQAHKLQGLPWVPAHPAVRAALRGMFRRYGRPKKQAAALGVPETLRIVAACEGTVAALRDRALFLLSFAGAFRRSEVARIRHEDLAFRDGAVDVFLPHSKGDQDGEGTVVTVLAGGSPATCPIAALRRWLQAAPADGYVFRAVRADGTVMDDGLHPDSVGRIVQKRAAEAGLVAGPRERISAHGFRAGFITEAYRRGSRDEEIMAHSRHRDLKTMRGYVRRAKLADAHPGRNLGL

SEQ ID NO: 1581 - protein, 311 aa, Unknown
  source: /note="Description of Unknown: Unclassified Methylobacterium sequence"
MTLPATLAARARAFADEALSENSRRAYRADWQHYARWCSGHDLAPLPAGPEQVASYLTSMAETHKRATIERRLVTIGQAHKLQGLPWVPAHPAVRAALRGMFRRYGRPKKQAAALGVPETLRIVAACEGTVAALRDRALFLLSFAGAFRRSEVARIRHEDLAFRDGAVDVFLPHSKGDQDGEGTVVTVLAGGSPATCPVAALRRWLQAAPADGYVFRAVRADGTVMDDGLHPDSVGRIVQKRAAEAGLVAGPRERISAHGFRAGFITEAYRRGSRDEEIMAHSRHRDLKTMRGYVRRAKLADAHPGRNLGL

SEQ ID NO: 1582 - protein, 311 aa, Methylobacterium sp. 190mf
MTLPATLAARARAFADEALSENSRRAYRADWQHYARWCGGHDLAPLPAGPDQVASYLTSMAETHKRATIERRLVTIGQAHKLQGLPWIPAHPAVRAALRGMFRRYGRPKKQAAALGVPETLRIVAACEGTVAALRDRALFLLSFAGAFRRSEVARIRHEDLAFRDGAVDVFLPHSKGDQDGEGTVVTVLAGGSPATCPIAALRRWLQAAPADGYVFRAVRADGTVMDDGLHPDSVGRIVQKRAAEAGLVAGPRERISAHGFRAGFITEAYRRGSRDEEIMAHSRHRDLKTMRGYVRRAKLADAHPGRNLGL

SEQ ID NO: 1583 - protein, 401 aa, Nocardia cyriacigeorgica
MTEDTGALALPDPVRAQLRRGVRSVLVDTAALREVRQRFADDQAATLARYLEASQSANTVRAYRTDWIAWTAWCAAEGRQALPADALDVAVYLAAAADARTDDGAPAFAPATLERKSAAIAAVHAANGLPSPTRSDVVRLTLRGIRRTRRARPVRKRPILLHTLEQLLDGLPAPGWPTEPARRRDTLALLIGFAGALRRSELAALRVGDVHVTQDHTTGEPVLLIHLPTSKTDPTGITEQRVALPRGTRPHTCPVCAFADWIALLAVYTSAPGRLREQLTAAPQPDPNIHRCHGFTGLPPALLPDQPLFPAVTRHGGIGSTPISGRAIAELVKRYAARAGLDPALFSGHSLRAGFATQAALGGAADREIMRQGRWSNPRTVHRYIRTANPLDDNAVTKLGL

SEQ ID NO: 1584 - protein, 321 aa, Unknown
  source: /note="Description of Unknown: Unclassified Synechococcus sequence"
METSLAQPSPFSVPTDNPDILSQLLENQKSPHTWRAYKKDIRDFFRFVADANEPTPILIEALLKLEQPQALALVLRYKNHLRDVRCLKEATINRRLAALKALVRLANQLGQCRYTLDGIRGEKVIHYRDTTGVSQNIYRQILKMPDQSTTKGKRDYAILRLLWDNALRRNEVVQTNLGDLDLERRSLDILGKGKGNQKEQITLSRATVTALESWLTVRPGPKEKNQPLFVALDRAHQGHRLTGTAIYQLVRSTARAAGVQKVLSPHRIRHAGITAALDATNGDVRKVQKFSRHADLNTLMIYDDNRRDVQGEITDLLAGLI

SEQ ID NO: 1585 - protein, 257 aa, Vibrio nigripulchritudo
MTNLKKSNPFKNRVVRRADGISKNANEKALKKRSALSEAPSFKHYRKMLDTIYLYNPVLSLLFEMQSLTGLRYSDASTLIRNDFYDEVTGNFKPHFEFTPLKTYSLALDRIKNKDKNNSSSDDIEAKARNEAILTIFTNDRIREVIDEVEELNGHIDSQFLFASEHVFSGGNPISIQYANRLLKRLHVDHPDLGFKETGTHSWRKYFATSMVELNGANLVQVQALLGHRDVNTTAKYVSKKKSDLQELIMQMKTEAA

SEQ ID NO: 1586 - protein, 367 aa, Sulfitobacter sp. AM1-D1
MTRNDEKLRPEPPNAATTDGHNADGAALTLPAHVAGSGTLDRLVDTARDYARAAASENTLKAYAKDWAHYTRWCRMKGTEPLPPAPEMIGLYLADLAAGSGPSPSQAAHRPLSVSTIERRLSGLAWNVAQRGFTLDRRNRHIATVLAGIRRRHARPPVQKEAILADDIRAMVATLPHDLRGLRDRAILLLGYAGGLRRSEIVSLDVHKDDTPDSGGWIEIFDKGALLTLDAKTGWREVEIGRGSRDQTCPVHALEQWLHFAKIDFGPVFTGTSRDGRRALDTRLNDKHVARLIKRTVLDAGIRSDLPDQERLKLFSGHSLRAGLASSAEVDERYVQKQLGHASAEMTRRYQRRRDRFRVNLTKAAGL

SEQ ID NO: 1587 - protein, 378 aa, Oscillatoriales cyanobacterium JSC-12
MPKRRAERGTVQFNNCNGSLRLLWTYQGERYSLALGLRNTPYHQKLANDRALWLTREIQYGRFNLEKLDQYREFLRGENVSLSELPTVKAPPLSQLWQQYLEVRNLGKSPSTIRQYNWVTRHIDRLPTKDTRQPQAILDAIAKLSPDVQKRLLTQFCACAKWAQKSGLLTDNPFLGAAAAVKLPQRGTVEDEIHPFSRAERDQIIQAFRNDLHYQHYANLVAFLFFTGARPSEVVPLQWGHVKANYILFEKSRVDTVTGYQTKQGLKTQNCRRFPVNEQLRAILVGMERSDDESLVFPSVKGTYIQWNNFTNRAWKSVLSKLPEIEYRNPYQMRHSFVSHCRSLNVPSIQVAEWIGNSVEMVDRVYAQVTESHSVPLL

SEQ ID NO: 1588 - protein, 386 aa, Rhodococcus sp. Br-6
MSSSRSVPAPATWENGVAAAAPPVLTDAMTARITESMAASRAESTTRAYASAWRRFEGWCTANGHVALPAHPASVAAYLVDAADTFTPDGERAYAPATFSKWIAAISHVHGRSGHTSPTTHETVRATLSGIRRSYASAGDRPRKQRAPLLVSDIVTMVTVARDSVTAWASEVLERRDSALLLMGFAGAFRRSELVGLNCGDVVVHRLDGLHIRLRKSKTDQDGDGAIRALPFTNSHTSCPPCAALRWWELVAAHERGGRAALIRTLRNAPAFDGHVCRGALPKISPHAPFFRAIAKNGNLSTTALSAAAVHGAVRRRAGAAGYDESLVAALGGHSLRAGFVTQAFRNGADAHAIMRQTGHKTPAMLEVYARENAPLIGNAVTDIGL

SEQ ID NO: 1589 - protein, 377 aa, Rhizobium oryzae
MTRIVDQNPENYPQEHSAASDSTADSADVSAPGASAGLPSPLPDANAGLPAHLQDLSDRARSYVEAASSANTRKAYASDWKHFAAWCRRQNLSPLPPDPQVVGLYITACASGTAERGMKQNSVSTIERRLAAIGWNCSQRGMPLDRRDRAIATVMAGIRNRHAAPPRQKEAILPEDLIAMLETLDRGTLRGLRDRAMLLIGFAGGLRRSEITGLDLGRDQTDDGRGWIEIFEKGLLVMLRGKTGWREVEIGRGSSDATCPVAAVETWIRFAKLAKGPLFRRVTSGGKDVGPDRLNDQEVARLVKKTALAAGVRGDLSEGGRAEKFAGHSLRAGLASSAEVDERYVQKQLGHASAEMTRRYQRRRDRFRVNLTKAAGL

SEQ ID NO: 1590 - protein, 309 aa, Gluconobacter oxydans
MFPETISAVLQGASDRLVLAARSPATLRAYRTDWVAFVAWCSAQNVTALPAQPETVSAWIASRLEQGRKAGTLARGVAAVSCAHELAGFEGFSRSRVVQDALRGMRRTLGTAPTRKAPATVDLLRRMLDVQPNTLIGLRNRALLALGFAGALRRSELATLEVGDLVPQEGGALLTLRRSKTDPDGAGQTIGILNGSTIRALDHLAAWCEAARITSGRLFRSVDRHGRTGESLSDRSVARIIKTAAEAVGLDPERFSGHSLRAGFITSGAEAGADALLIAETSRHQSLDVLRTYVRRASLLKAHAGQRFL

SEQ ID NO: 1591 - protein, 278 aa, Lachnoclostridium pacaense
MTATPKLQPNHTLDLFEKYLVARNKSPNTICVYRYAVEQFYHLYPQLTPRNLQLYKVYLLEHYKPQTVNLRIRALNCFMEYRQTSITPITMIKIQQKTYLDKIISQADYEYLKRKLVENEEFTYYFIVRLITTTGVRVSELITFQIEDIDRGHKDIYSKGNKMRRIYVPTQLGIEFKQWFQHIGRRSGHLFLNRFGSPLSPSGIRAQFKVFAARYHLDPEVMYPHSFRHRFAKNFIEKCGDITLLSDLLGHESIETTRIYLRRSSSEQYRIINKVVDW

SEQ ID NO: 1592 - protein, 385 aa, Erythrobacter sp. SG61-1L
MNADAPEPPAQPSPAAALPVPFPDPFVAEVVEDVRDLVGAGVRLDAELVSAAVRGWSDNTRRAFRSDLTVWGDWCRRHGVVPARATPSHVAAFIRALSGIDPSAEEIRAMATIERYVSYIGRAYRLAGLPDPTSGELITFEKKAARKKRGVRQRQARAIRFKGDIADFDSPASGVCLAHLLKAVRRDEMGLRDEALMRVAYDVAARRSEVVAIDVDHIHGPDAQGAGALFIPSSKTDQEGEGAWGYLSPATMKAIARWREAARIDKGPLFRRIETHFDGSIAAIGTKRLHPNSINLIYKRLVQRAFDKKLLGPMSEAEVARWVAAVSSHSLRVGVAQDNFAAREPLPAIMQAYRWRDPKTVLRYGAQLAVKSGAAARMAARVNES

SEQ ID NO: 1593 - protein, 368 aa, Erythrobacter sp. SG61-1L
MPVPFPDPFVAEVVEDVRDLVGAGVRLDAELVSAAVRGWSDNTRRAFRSDLTVWGDWCRRHGVVPARATPSHVAAFIRALSGIDPSAEEIRAMATIERYVSYIGRAYRLAGLPDPTSGELITFEKKAARKKRGVRQRQARAIRFKGDIADFDSPASGVCLAHLLKAVRRDEMGLRDEALMRVAYDVAARRSEVVAIDVDHIHGPDAQGAGALFIPSSKTDQEGEGAWGYLSPATMKAIARWREAARIDKGPLFRRIETHFDGSIAAIGTKRLHPNSINLIYKRLVQRAFDKKLLGPMSEAEVARWVAAVSSHSLRVGVAQDNFAAREPLPAIMQAYRWRDPKTVLRYGAQLAVKSGAAARMAARVNES

SEQ ID NO: 1594 - protein, 369 aa, Roseovarius azorensis
MLSGMAENIEKSSSEAANVSSSNDDNERDRQDGEALSLPSSVAGSGALDRLVETARDYARAAASENTLKAYAKDWTHFARWCRMKGAEPLPPSPEMIGLYLADLASGSGPSSTLSVSTIDRRLSGLAWNYAQRGFTLDRKNRHIATVLAGIKRKHARPPAQKEAILAEDILAMVATLPYDLRGLRDRAILLIGYAGGLRRSEIVSLDVGKDNTPNSGGWIEILENGVILTLNAKTGWREVEIGRGSSEQTCPVHALEQWLHFAKIDFGPVFVRTSRDGKKALEARLSDKHVARLIKRTVLDAGIRSDLPEKDRLALFSGHSLRAGLASSAEVDERYVQKQLGHASAEMTRRYQRRRDRFRVNLTKAAGL

SEQ ID NO: 1595 - protein, 371 aa, Epibacterium scottomollicae
MASETERSTSARSDELDDAPLDERDQRNSNYIALPSHVAASGALDRLVDTARNYARAAASDNTLKAYAKDWAHFARWCRMKGAEPLPPAPEMIGLYLADLASGSGPSPSRSASRSLSVSTIDRRLSGLGWNFAQRGFTLNRKNRHIATVLAGIKRKHARPPVQKAAILAEDILAMVATLPFDLRGLRDRAILLLGYAGGLRRSEIVSLDVHKDDTPDSSGWIEIMEKGALLTLNAKTGWREVEICRGSKDQTCPVHALEQWLRFAKIDFGPVFVGTSRDGKRALETRLNDKHVARLIKRTVLDAGIRSDLPDSERLALFSGHSLRAGLASSAEVDERYVQKQLGHASAEMTRRYQRSRDRFRVNLTKAAGL

SEQ ID NO: 1596 - protein, 365 aa, Maritimibacter alkaliphilus
MPSETEKSSSTPSDELNDARVDERAREESDDIALPSHVAGSGTLDRLVDTARDYARAAASDNTLKAYAKDWAHFTHWSRMKGAEPLPPSTEMVGLYLADLASGSGLSPALSVSTIDRRLSGLAWNYAQRGFTLDRKNRHIATVLAGIKRKHARPPVQKEAILAEDILAMVATLPYDLRGLRDRAILLVGYAGGLRRSEIVSLDVHKDDTPGSGGWIEIFDKGALLTLNAKTGWREVEIGRGSKEQTCPVHALKQWLDFAKIDFGPVFVGTSRDGKRTSETRLNDKHVARLIKRTVLDAGIRSELPEQERMALFSGHSLRAGLASSAEVDERFVQKHLGHTSAEMTRRYQRRRDRFRVNLTKAAGL

SEQ ID NO: 1597 - protein, 337 aa, Jonesia quinghaiensis
MVNPMESHLTSTHTGPLAFPSEHDVLRLVDHSRSDNTHRTYDVGVRSWARFASTYSYQAFPADPAEVALWLSALFDEGKSTATAKTYLQSLRDHHRERGSSALNDIEGLRRVMQGIQRLNRERDARKARALSPTELMMLVGQSRMSGTLRGTRDTAWWLLCTSLGLRYSDAAILERRDIRFVEEKGAVVTLRFSKTDQFARGTDLALARARFAHVDPVMALTDLLKALPEDPHTPVFQSVLKSNRWSGRSLTNTGLNKAIRRLADDTGINGERLTAHSARVTFATNAYAAGIDESAIAITGRWKSLSVQRSYRRVDDESLFDKRSTASYWLEETLSR

SEQ ID NO: 1598 - protein, 387 aa, Geobacillus thermodenitrificans
MAGSIEKRGKNSYRLVYSMGFDANGKRIKRTKTVHVKTKKEAEKELAKFIAEIEAGEYIKPAKMSLSDFIQLWRDNYAEKQLSPKTFETYNNYINTRIIPQLGHLQLADIKPIHLIRFLNNLKKDETRLDGKKGSLSEATINYYRRILKNIFNRAVEWKFLQVNPAEKLPKEKEDIGKGDVYDENETRLLLKCLEKEDLKWRLYFTLALTCGLRKGELLALQWEDIDLESGTLYVKHSLSYTKEKGFFLKEPKSKKSKREIAIPSFVLPLLKKYKNVRLREKEKLQDEWEGGNYNFVFATWNGKPHHHSYPRTKWERFLKRNNLRYIRPHDLRHTSATIMLNNGVNYKTVSERLGHSSTRITFDFYVHRTKEADRSAAECFDNQFGA

SEQ ID NO: 1599 - protein, 400 aa, Unknown
  source: /note="Description of Unknown: Unclassified Massilia sequence"
MPLTDTRVRQLKHTGKPTGDKYTDSRSLHLLVKEAGKYWRMSYRFDGKQRTLALGVYPSVTLAKARQLRDQARQLLSEGVDPVEAKRRDKVAKESAAKHSFEAVARDLLKLRACSLAPSTIRKNTAWLEKNVFPEMGMMPISKIEPRDVLFMLRKIEARGAIESTHKIRQLCGQVFRFAVASGLASRDVTFDLRDALPSVPEVHYAAITEPKQAAALMRSISNYSGHPYSRAALRLAPLFFVRPGVLRAAEWSEFDLDRGVWFIPATKMKIRQPHIVPLARQAVGILRSMHQLTGHAKYVFPSIRAKDRCMSENTINAALRAMGYSKDMMTGHGFRAMARTILDEVLGERVDLIEHQLAHAVRDANGRAYNRTTHLPARIEMMQRWADYLDQIALPQATS

SEQ ID NO: 1600 - protein, 387 aa, Unknown
  source: /note="Description of Unknown: Unclassified Massilia sequence"
MPNFTPIDLGPSAPEEITSSPSGRAHVKMYRLADDAITEATTDIELAREFIAHGELSAKSIQNSQKELYRFLTWCREEARKTLVQLNVADLNAYKDFLKNPPPEWISRTKWPRSDPRYRPFTGPLSDPSRRQAMIAVKGLMGFAEQTGYLRRNPGALVRNVRAPSASRITRYLTQNAIALALQTVSARPADTPAAFRRRARDRFLLIAFAHTGARLNEIVSASMGSIYTEGNGRWWLDVLGKGNKPRRLPVPPDMLEAFQSYRQAFELLPQSSRTDRTPLVLSSRSRELARITDEAAAEAIKAVFADAARAADAQGDQDTAATLRQASAHWLRHSMLTNHANNGVQLKTLQDTAGHANIATTAAYLHKTDNERHDEIIRSANGNGIL

SEQ ID NO: 1601 - protein, 368 aa, Plesiomonas shigelloides
MALSQHQQALSQLQSFNALPLHLRSMATAHQQFTRYAEDSYSANTLRMVDFAEKHWAHWLAKQTDLPAECWHEQQLLLYPIWPDILCRYIDELSESMSLNSVQTYINLLNFKNKKLGFPSLLQHTHVQWAMRRATNRALDAGEQIGQAQPFRLHDLELLLQIFADTDDPKLMRDLLLVWIAYESLLRESELVNIRCNDLLPGRQYSIRVRKTKTTKTLEDNEVLLSEPCSQWLHRYMTHFGLPLSSSGYLFRRLKKNGELFHSEENCKKLSGRTVDDIFRFFYWQIDPDARAELQNSIHAADASRYQTWTGHSARVGAAIDLFVYGASVHEIMRLGRWRNDQTVMRYIRRVSMQELPMNRMVTERLKR

SEQ ID NO: 1602 - protein, 369 aa, Shewanella putrefaciens
MSKSIIHYSTGGSAPSRSSGIASNFTSSDKQIDTPFFEESSLPQSVHSDFFNAAAETEYEISINTRRVYRTSFGLFEQYCATHQLQSLPADPRSIISFIGHQKELLQASSGTQLSKQTLTTRLAAIRYYHIQAGFPSPTEHPLVIRVMRGLSRNHHRQVQDYDQQPIMYDEVELLIQAIEQQPHPLLRSRDKAIIQLGLQGGFRRSELANLKVQYLSFMRDKLKVRLPFSKSNQQGLREWKNLPDSEPFAAYNAVKDWLNESKITEGHLFRSISRDGKTLRPYQVSDNVTSKSSLIRNSGFLNGDDIYRIIKQYCLKAGLPAQYYGAHSLRSGCVTQLHENNKDTLYIMARTGHTDPRSLRHYLKPKED

SEQ ID NO: 1603 - protein, 369 aa, Shewanella decolorationis
MSKSLNHYFAGDNTPTRISGMASTITPVYKQTDSPFFEESSLPQSVHSDFFNAAAETEYEISSNTRRVYRTSFGLFEQYCATHQLQSLPADPRSIISFIGHQKELLQASNGTQLSKQTLITRLAAVRYYHIQAGFPSPTEHPQVIRVMRGLSRNHHRQVQDYDQQPIMYDEVELLIQAIEQQPHPLLRTRDKAIIQLGLQGGFRRSELANLKVQYLSFMRDKLKVRLPFSKSNQQGLREWKNLPESEPFAAYNAIKDWLHESKITEGHLFRSISRDGKSLRPYQVSDKVTSKSSLVRNSGFLNGDDIYRIIKQYCVKAGLPAQYYGAHSLRSGCVTQLHENNKDTFYIMARTGHTDPRSLRHYLKPKED

SEQ ID NO: 1604 - protein, 369 aa, Shewanella sp. BC20
MSKSIIHYSTGGSAPSRSSGIASNFTASDKKMDTPFFEESSLPQSVHSDFFNAAAETEYEISINTRRVYRTSFGLFEQYCVAHQLQSLPADPRSIISFIGHQKELLQASSGTQLSKQTLTTRLAAIRYYHIQAGFPSPTEHPLVIRVMRGLSRNHHRQVQDYDQQPIMYDEVELLIQAIEQQPHPLLRSRDKAIIQLGLQGGFRRSELANLKVQYLSFMRDKLKVRLPFSKSNQQGLREWKNLPDSEPFAAYNAVKDWLKESQITDGHLFRSISRDGKTLRPYQISDKVTCKSSLVRNSGFLNGDDIYRIIKQYCVKAGLPSQYYGAHSLRSGCVTQLHENNKDTLYIMARTGHTDPRSLRHYLKPKED

SEQ ID NO: 1605 - protein, 371 aa, Shewanella putrefaciens
MSKMIRTNSNAQNNTNVTNERVTGSDHHNNNRAEQPRFFEETFLPQSVRSDYLSAAEETEYEISANTRRVYNTSFSLFSRYCAEHQLQALPADPRSVISFIGYQKELIQESTGVQLSKQTLTTRLAAIRYHHIQAGFHSPTEHPLVIRVMRGLSRNQSRHVSDYDQQPIMYDEVEMLIQAIDEQVQPLTRARDKAIIQLGLQGGFRRSELADIKVQYVSFLRNKLKVRLPYSKSNQQGQREWKDLPDHEPFAALNAVKNWLSLANIEDGHLFRSLSRDGKYLRPYQIVEHHSEANSSLHKNSGFLTGDDIYRIIKKYCTKAGLPAKFYGAHSLRSGCVTQLHENDKDHLYIMARTGHTDPRSLRHYLKPRD

SEQ ID NO: 1606 - protein, 371 aa, Shewanella baltica OS223
MSKMIRTNSNAQNNTNISNERVIGSGHHHNNRAEQPRFFEESFLPQSVRSDYLSAAEETEYEISVNTRRVYNTSFSVFSRYCAEHQLQALPADPRSVISFIGHQKELIQESTGVQLSKQTLTTRLAAIRYHHIQAGFHSPTEHPLVIRVMRGLSRNQSRHVSDYDQQPIMYDEVEMLIQAIDEQVQPLTRARDKAIIQLGLQGGFRRSELADIKVQYVSFLRNKLKVRLPYSKSNQQGQREWKDLPDHEPFAALDAVKNWLSLANIEDGHLFRSLSRDGKKLRPYQMKNRHSGSNSLLNKNSGFLTGDDIYRIIKKYCTKAGLPAKFYGAHSLRSGCVTQLHENNKDHLYIMARTGHTDPRSLRHYLKPKD

SEQ ID NO: 1607 - protein, 371 aa, Shewanella baltica BA175
MSKMIRTNSNAQNNANISNEIATGSGHHHNNRAEQPRFFEETFLPQSVRSDYLSAAEETEYEISVNTRRVYNTSFNVFSRYCAEHQLQALPADPRSVISFIGHQKELIQESTGVQLSKQTLTTRLAAIRYHHIQAGFHSPTEHPLVIRVMRGLSRNQSRHVSDYDQQPIMYDEVEMLIQAIDEQVQPLTRARDKAIIQLGLQGGFRRSELADIKVHYVSFLRNKLKVRLPYSKSNQQGQREWKDLPDHEPFAALDAVKNWLSLANIEDGHLFRSLSRDGKNLRPYQMKDRHSGSSSLLNKNSGFLTGDDIYRIIKKYCTKAGLPAKFYGAHSLRSGCVTQLHENNKDHLYIMARTGHTDPRSLRHYLKPKD

SEQ ID NO: 1608 - protein, 371 aa, Shewanella baltica
MSKMIRTNINAQNNTNISNERVIGSGHHHNNRAEQPRFFEESFLPQSVRSDYLSAAEETEYEISVNTRRVYNTSFSVFSRYCAEHQLQALPADPRSVISFIGHQKELIQESTGVQLSKQTLTTRLAAIRYHHIQAGFHSPTEHPLVIRVMRGLSRNQSRHVSDYDQQPIMYDEVEMLIQAIDEQVQPLTRARDKAIIQLGLQGGFRRSELADIKVQYVSFLRNKLKVRLPYSKSNQQGQREWKDLPDHEPFAALDAVKNWLSLANIEDGHLFRSLSRDGKNLRPYQMKDRHSGSSSLLNKNSGFLTGDDIYRIIKKYCTKAGLPAKFYGAHSLRSGCVTQLHENNKDHLYIMSRTGHTDPRSLRHYLKPKD

SEQ ID NO: 1609 - protein, 371 aa, Shewanella halifaxensis
MNSEQQCPKQVPSLNEQEHALGHFSGGLTNGHSTQHAPSQNPNEKFFQEQQLPISILDDYKSAASETQYEISDNTRRVYRSSFAIFRNYCDQHNLSALPADPRSVISFIGHQKEIYQEKSGHQLSKQTINTRLAAIRFFHIQAAHHSPTEHPLVIRVMRGLMRNQYRQISDYDQQPITYDELEMLLDVIERQPQQLTRLRDKAILQLGLQGGFRRSELAEIRVEHISFLREKLKVRVPYSKSNQQGQREWKDLPKQELFSAYEAVQQWLDATKIKQGHLFRSLSRDGNSVRDYQITQAKMGKGFLKGDDIYQMIKKYCDKAGLNSRFYGAHSLRSGCVTQLHENDKDHLYIMARTGHTDPRSLRHYLKPKD

SEQ ID NO: 1610 - protein, 354 aa, Shewanella baltica
MASYSIQKREKADGTVRHRCLVRVKKNGKILYTEQRTFTKYAAAEAWGKDRVIDIESNGFATEDTAPITLGSIISKALTDENIDSSIGRSKRFCLRLLSDCDIAKLNLTDIKPHHIIDHCKLRRSAGTGPSTIAVDVSVIRWLLRIAKSNFGHEVSQISVIEAYDALYSQDLIAKSGKRSRRPTTDEIERLKVGLAARADQRAAHIPYIDLLDFSILSCMRIGEVCRITWDDVDEAQKAVIVRDRKDPRKKAGNHMLVPLLGGAWEILQKQPRNDARVFPYNERSVTAGFQRVRNELGIEDLRYHDLRREGASRLFEKGYSIDEVAQVTGHRNINTLWQVYTELFPKRLHDKDC

SEQ ID NO: 1611 - protein, 350 aa, Shewanella putrefaciens
MTGSDHHNNNRAEQPHFFEETFLPQSVRSDYLSAAEETEYEISANTRRVYNTSFSLFSRYCAEHQLQALPADPRSVISFIGHQKELIQESTGVQLSKQTLTTRLAAIRYHHIQAGFHSPTEHPLVIRVMRGLSRNQSRHVSDYDQQPIMYDEVELLIQAIDEQVQPLTRARDKAIIQLGLQGGFRRSELADIKVQYVSFLRNKLKVRLPYSKSNQQGQREWKDLPDHEPFAALSAVKNWLSLANIEDGHLFRSLSRDGKYLRPYQIVEHHSEANSSLHKNSGFLTGDDIYRIIKKYCTKAGLPAKFYGAHSLRSGCVTQLHENDKDHLYIMARTGHTDPRSLRHYLKPRD

SEQ ID NO: 1612 - protein, 350 aa, Shewanella baltica
MIGSGHHHNNRAEQPRFFEESFLPQSVRSDYLSAAEETEYEISVNTRRVYNTSFSVFSRYCAEHQLQALPADPRSVISFIGHQKELIQESTGVQLSKQTLTTRLAAIRYHHIQAGFHSPTEHPLVIRVMRGLSRNQSRHVSDYDQQPIMYDEVEMLIQAIDEQVQPLTRARDKAIIQLGLQGGFRRSELADIKVQYVSFLRNKLKVRLPYSKSNQQGQREWKDLPDHEPFAALDAVKNWLSLANIEDGHLFRSLSRDGKNLRPYQMKDRHSGSSSLLNKNSGFLTGDDIYRIIKKYCTKAGLPAKFYGAHSLRSGCVTQLHENNKDHLYIMSRTGHTDPRSLRHYLKPKD

SEQ ID NO: 1613 - protein, 410 aa, Shewanella pealeana
MANSTKQLTATQVSNAKPKEKEYNLADGRGLSLRVKTGGSKFWLLNYTRPVTQKRANLGLGTYPDVPLAEARKRREAARELLAQGIDPQHHQQQQKAAIKTDAENTLKSVTNAWFEIKKQKVSENHGQKLYRRLELYLFPALGGTPISVLTAPQVIQVLKPAEAKGNIETCKRVISWLNEVMTFAVNTGLIHSNPLIGIAAAFGVPEKRQMPTLKPAELPEFIEALTYSSIKKTTRCLIEIQLHTMTRPAEAAKAKWTEIDFDKQLWTIPAERMKMKREHIIPLTPQVISLLNRMHEISGDLEYIFPADRNKHHHTNTETANMAIKRMGYKGRLVAHGLRALASTTLNEQGFDAELIEVSLAHVDKNTVRAAYNRADYIERRRELMCWWSEHVQITPNQLNSVITQQLLK

SEQ ID NO: 1614 - protein, 400 aa, Shewanella pealeana ATCC 700345
MLDLTSLLQIKAKDLKMNSEQNFPEIEGFSQIEDSDLIENAPQEVAIVDGESALTRFNSGLAESRTSQFDHNEKFFKEQQLPISILDDYKSAAGETQYEISANTRRVYRSSFTIFKNYCDQHNLSPLPADPRSVISFIGHQKELYQEKNGHQLSKQTINTRLAAIRFFHIQAALHSPTEHPLVIRVMRGLMRNQYRHVSDYDQQPITYDELEMLLAVIDQQPKELTRLRDKAILQLGLQGGFRRSELAEVRIEHISFLREKLKVRVPYSKSNQQGQREWKDLPKQELFSAYDAVQQWLDATKIKQGHLFRSLSRDGNSVREYQITQEKIGKGFLKGDDIYQMIKKYCDKAGLNSRFYGAHSLRSGCVTQLHENDKDHLYIMARTGHTDPRSLRHYLKPKD

SEQ ID NO: 1615 - protein, 369 aa, Shewanella sp. MR-4
MSKSIIHYSTGGNAPSRSSGIASNFTSSDKQMDTPFFEESSLPQSVHSDFFNAAAETEYEISINTRRVYRTSFGLFEQYCTAHQLQSLPADPRSIISFIGHQKELLQASSGTQLSKQTLTTRLAAIRYYHIQAGFPSPTEHPLVIRVMRGLSRNHHRQVQDYDQQPIMYDEVELLLQAIEQQPHPLLRSRDKAIIQLGLQGGFRRSELANLKVQYLSFMRDKLKVRLPFSKSNQQGLREWKNLPDSEPFAAYNAVKDWLNESKITEGHLFRSISRDGKTLRPYQVSDNVTSKSSLIRNSGFLNGDDIYRIIKQYCLKAGLPAQYYGAHSLRSGCVTQLHENNRDTLYIMARTGHTDPRSLRHYLKPKED

SEQ ID NO: 1616 - protein, 367 aa, Shewanella xiamenensis
MSKTNRFYPIDVNQQSVGVNTHLTKKLTQADNAFFEESALPQSVHNDFYNAAAETEFEISSNTRRVYQTSFSLFAQYCLEHRLQSLPTDPRSVISFIGHQKELLMADTGMQLSKQTLTTRLAAIRYYHIQAGFPSPTEHPLVLRVMRGLSRNHNRRVQDYDQQPIMYDDVELLLQAVEQQPHPLLRSRDKAIIQLGLQGGFRRSELANLKVQYLSFMRDKLKVRLPFSKSNQQGLREWKNLPDSEPFAAYHAVKAWLHESQISDGHLFRSISRDGKTLRPYQVKDNNKSNTTFNRNSGFLNGDDIYRIIKQYCVKAGLPAQYYGAHSLRSGCVTQLHENNKDTLYIMARTGHTDPRSLRHYLKPKED

SEQ ID NO: 1617 - protein, 355 aa, Shewanella psychrophila
MNKLSINQNHRQQVTGDKSFFEEQELPISIFDDFKSAASETEYEVAPNTRRVYRSSFNIFTQYCQHHGLNNLPADPRSVISFIGHQKEQVHKKTGAQFSKQTITTRLAAIRFYHIQAGFHSPTEHPLVIRVMRGLSRNKHRVITDYDQQPIMYDELELLLQTIDKQGQELTKARDKAIIQLGFQGGFRRSELAEIQVKHINFLRNKLKVRLPYSKSNQQGHREWKDLPGSELFSAFGAVKHWLDVSQLSQGHLFRSLSRDGQSLRPYSVVNQANLNTDENPPQLNRGFLRGDDIYQMIKKYCSKAGLSPEFYGAHSLRSGCVTQLHENDKDHLYIMARTGHTDPRSLRHYLKPKD

SEQ ID NO: 1618 - protein, 355 aa, Shewanella violacea
MNKLSINQFNRPAITSDKSFFQEQELPISILDDFKSAASETEYEVADNTRRVYRSSFNIFTEYCQHHGLNHLPADPRSVISFIGHQKEQVHHRTGMQFSKQTITTRLAAIRFYHIQAGFHSPSEHPLVIRVMRGLSRNKHRLTSDYDQQPIMYEELELLLQTIDKQEQELTRARDKAIIQLGFQGGFRRSELAEIQVNHVNFLRNKLKVRLAYSKSNQQGHKEWKDLPESEQFSAFSAVRHWLEVSQLTQGHLFRSLTRDGQRLRPYSVASRVNLNSHDNLPQVNRGFLRGDDIYQMIKKYCRKAGLSPEFYGAHSLRSGCVTQLHENDKDHLYIMARTGHTDPRSLRHYLKPKD

SEQ ID NO: 1619 - protein, 371 aa, Shewanella baltica
MSKMIRTNSNAQNNANISNERATGSDHHHNNRVEQPRFFEETFLPQSVRSDYLSAAEETEYEISVNTRRVYNTSFNVFSRYCAEHQLQALPADPRSVISFIGHQKELIQESTGVQLSKQTLTTRLAAIRYHHIQAGFHSPTEHPLVIRVMRGLSRNQSRHVSDYDQQPIMYDEVEMLIQAIDEQVQPLTRARDKAIIQLGLQGGFRRSELADIKVQYVSFLRNKLKVRLPYSKSNQQGQREWKDLPDHEPFAALDAVKNWLSLANIEDGHLFRSLSRDGKNLRPYQMKDRHCGSSSLLNKNSGFLTGDDIYRIIKKYCTKAGLPAKFYGAHSLRSGCVTQLHENNKDHLYIMARTGHTDPRSLRHYLKPKD

SEQ ID NO: 1620 - protein, 371 aa, Shewanella putrefaciens
MSKMIRTNSNAQNNANISNERVKESDHHHNNRAEQPRFFEESFLPQSVRSDYLSAAEETEYEISVNTRRVYNTSFSVFSRYCAEHQLQALPADPRSVISFIGHQKELIQESTGVQLSKQTLTTRLAAIRYHHIQAGFHSPTEHPLVIRVMRGLSRNQSRHVSDYDQQPIMYDEVEMLIQAIDEQMQPLTRARDKAIIQLGLQGGFRRSELADIKVQYVSFLRNKLKVRLPYSKSNQQGQREWKDLPDHEPFAALDAVKNWLSLANIEDGHLFRSLSRDGKNLRPYQMKDRHSGSSSLLNKNSGFLTGDDIYRIIKKYCTKAGLPAKFYGAHSLRSGCVTQLHENNKDHLYIMARTGHTDPRSLRHYLKPKD

SEQ ID NO: 1621 - protein, 347 aa, Shewanella piezotolerans
MSRKHISPISNKVSSTSSNNDFYQEAELPISMLNDFESAAKETRYEISNNTRRVYRSSFGIFKAYCDAHGRSSIPADPRTVISFIGHQKDFYQAKSGHQLSTQTINSRLAAIRFYHIQSGTPSPTEHPLVTRVMRGLMRNHTRIVSDYDQQPIMYEELEILIQAIENQSQPLTQKRDKAIILLGFQGGFRRSELANIKVNHLSFLRDKLKVRLPYSKSNQQGQREWKVLPKGETFSAYEPIKDWLNAAKIKEGHLFRSLTRDGRYIRDYQVLDANSGKGFLRGDDIYQLIKRYCNKADLDPKFYGAHSLRSGCVTQLHENNKDHLYIMGRTGHTDPRSLNHYLKPND

SEQ ID NO: 1622 - protein, 369 aa, Shewanella sp. Shew256
MSKSIIHYSTGGSAPSRSSGITSNITSSDKQMDPPFFEESSLPQSVHSDFFNAAAETEYEISINTRRVYRTSFGLFEQYCATHQLQSLPADPRSIISFIGHQKELLQASNGTQLSKQTLTTRLAAIRYYHIQAGFPSPTEHPLVIRVMRGLSRNHHRQVQDYDQQPIMYDEVELLIQAIEQQPHPLLRLRDKAIIQLGLQGGFRRSELANLKVQYLSFMRDKLKVRLPFSKSNQQGLREWKNLPDSEPFAAYNAVKDWLHESKITEGHLFRSISRDGKTLRPYQVSDKVTSKSSLVRNSGFLNGDDIYRIIKQYCLKAGLPAQYYGAHSLRSGCVTQLHENNKDTLYIMARTGHTDPRSLRHYLKPKED

SEQ ID NO: 1623 - protein, 369 aa, Shewanella sp. MR-7
MSKSIIHYSTGGSAPSRSSGIASNITASDKKMDTPFFEESSLPQSVHSDFFNAAAETEYEISINTRRVYRTSFGLFEQYCATHQLQSLPADPRSIISFIGHQKELLQASSGTQLSKQTLTTRLAAIRYYHIQAGFPSPTEHPLVIRVMRGLSRNHHRQVQDYDQQPIMYDEVELLIQAIEQQPHPLLRLRDKAIIQLGLQGGFRRSELANLKVQYLSFMRDKLKVRLPFSKSNQQGLREWKNLPDSEPFAAYNAVKDWLKESQITDGHLFRSISRDGKTLRPYQISDNVTCKSSLVRNSGFLNGDDIYRIIKQYCVKAGLPSQYYGAHSLRSGCVTQLHENNKDTLYIMARTGHTDPRSLRHYLKPKED

SEQ ID NO: 1624 - protein, 369 aa, Shewanella oneidensis
MSKSIQIYTADDSHSHQAVGISANLTKPFTQGDKTFFEESSLPQSVHADFYNAASETEYEISNNTRRVYRISFSFFEQYCLEHNLQSLPADPRSIISFIGHQKELLQASTGMQLSKQTLTTRIAAIRFYHIQAGFPTPTEHPQVIRVMRGLSRNHHRLVQDYDQQPIMYDEVELLIQAVDQQPHPLLRLRDKAIIQLGLQGGFRRSELANLKVHYLSFMRDKLKVRLPFSKSNQQGLREWKSLPDSEPFAAYHAVKSWLNESQITDGHLFRSISRDGKTLRPYHVNDNSKPKSTFSRNSGFLNGDDIYRIIKQYCLKAGLPAQYYGAHSLRSGCVTQLHENNKDILYIMARTGHTDPRSLRHYLKPKED

SEQ ID NO: 1625 - protein, 367 aa, Shewanella xiamenensis
MSKTNRFYPIDVNQQPVGVNTHLTKNLTQAGNAFFEESALPQSVHNDFYNAAAETEFEISSNTRRVYQTSFSLFAQYCLEHRLQSLPTDPRSVISFIGHQKELLMADTGMQLSKQTLTTRLAAIRYYHIQAGFPSPTEHPLVLRVMRGLSRNHNRRVQDYDQQPIMYDEVELLLQAVEQQPHPLLRSRDKAIIQLGLQGGFRRSELANLKVQYLSFMRDKLKVRLPFSKSNQQGLREWKNLPDSEPFAAYHAVKAWLHESQISDGHLFRSISRDGKTLRPYQVKDNNKSNTTFNRNSGFLNGDDIYRIIKQYCVKAGLPAQYYGAHSLRSGCVTQLHENNKDTLYIMARTGHTDPRSLRHYLKPKED

SEQ ID NO: 1626 - protein, 367 aa, Shewanella sp.
MSKTNRFYPIDVNQQPVGVNTHLTKKLTQADNAFFEESALPQSVHNDFYNAAAETEFEISSNTRRVYQTSFSLFAQYCLEHRLQSLPTDPRSVISFIGHQKELLMADTGMQLSKQTLTTRLAAIRYYHIQAGFPSPTEHPLVLRVMRGLSRNHNRRVQDYDQQPIMYDEVELLLQAVEQQPHPLLRSRDKAIIQLGLQGGFRRSELANLKVQYLSFMRDKLKVRLPFSKSNQQGLREWKNLPDSEPFAAYHAVKAWLNESQISDGHLFRSISRDGKTLRPYQVKDNNKSNTTFNRNSGFLNGDDIYRIIKQYCVKAGLPAQYYGAHSLRSGCVTQLHENNKDTLYIMARTGHTDPRSLRHYLKPKED

SEQ ID NO: 1627 - protein, 367 aa, Unknown
  source: /note="Description of Unknown: Unclassified Shewanella sequence"
MSKTNRFYPIDVNQQPVGVNTHLTKKLTQADNAFFEESALPQSVHNDFYNAAAETEFEISSNTRRVYQTSFSLFAQYCLEHRLQSLPTDPRSVISFIGHQKELLMADTGMQLSKQTLTTRLAAIRYYHIQAGFPSPTEHPLVLRVMRGLSRNHNRRVQDYDQQPIMYDEVELLLQAVEQQPHPLLRSRDKAIIQLGLQGGFRRSELANLKVQYLSFMRDKLKVRLPFSKSNQQGLREWKNLPDSEPFAAYHAVKAWLHESQISDGHLFRSISRDGKTLRPYQVKDNNKSNTTFNRNSGFLNGDDIYRIIKQYCVKAGLPAQYYGAHSLRSGCVTQLHENNKDTLYIMARTGHTDPRSLRHYLKPKED

SEQ ID NO: 1628 - protein, 355 aa, Shewanella benthica
MNKLSINQYHPRQVTSDKSFFEETELPISILDDFKSAASETEYELAPNTRRVYRASFNIFTQYCQHHGLSNLPADPRAVISFIGHQKEQVQQKTGMQFSKQTITTRLAAIRFYHIQAGFHSPTEHPLVIRVMRGLSRNKHRLTKDYDQQPIMYDELELLLQTIDKQGQELTRARDKAIIQLGFQGGFRRSELADIQVNHINFMRKKLKVRLAYSKSNQQGHKEWKDLPESELFSAFSAVKHWLQVSQLTQGHLFRSLSRDGQRLRPYSVANKSSVDSYANPPQVNRGFLRGDDIYQMIKKYCAKAGLSPEFYGAHSLRSGCVTQLHENDKDHLYIMARTGHTDPRSLRHYLKPKD

SEQ ID NO: 1629 - protein, 371 aa, Shewanella sp. WE21
MSKMIRTNSNAQNNTNVTNERVTGSDHHNNNRAEQPRFFEETFLPQSVRSDYLSAAEETEYEISANTRRVYNTSFSLFSRYCAEHQLQALPADPRSVISFIGHQKELIQESTGVQLSKQTLTTRLAAIRYHHIQAGFHSPTEHPLVIRVMRGLSRNQSRHVSDYDQQPIMYDEVEMLIQAIDEQVQPLTRARDKAIIQLGLQGGFRRSELADIKVQYVSFLRNKLKVRLPYSKSNQQGQREWKDLPDHEPFAALNAVKNWLSLANIEDGHLFRSLSRDGKYLRPYQIVEHHSEANSSLHKNSGFLTGDDIYRIIKKYCTKAGLPAKFYGAHSLRSGCVTQLHENDKDHLYIMARTGHTDPRSLRHYLKPRD

SEQ ID NO: 1630 - protein, 371 aa, Shewanella baltica
MSKMIRTNSNAQNNANISNERATGSDHHHNNRAEQPRFFEESFLPQSVRSDYLSAAEETEYEISVNTRRVYNTSFSVFSRYCAEHQLQALPADPRSVISFIGHQKELIQESTGVQLSKQTLTTRLAAIRYHHIQAGFHSPTEHPLVIRVMRGLSRNQSRHVSDYDQQPIMYDEVEMLIQAIDEQVQPLTRARDKAIIQLGLQGGFRRSELADIKVQYVSFLRNKLKVRLPYSKSNQQGQREWKDLPDHEPFAALDVVKNWLSLANIEDGHLFRSLSRDGKNLRPYQMKDRHCGSSSLLNKNSGFLTGDDIYRIIKKYCTKAGLPAKFYGAHSLRSGCVTQLHENNKDHLYIMARTGHTDPRSLRHYLKPKD

SEQ ID NO: 1631 - protein, 371 aa, Shewanella sp. SACH
MSKMIRTNSNAQNNTNVSNERANESGHHHNNRAEQTRFFEETFLPQSVRSDYLSAAEETEYEISVNTRRVYNTSFSVFSRYCAEHQLQALPADPRSVISFIGHQKELIQESTGVQLSKQTLTTRLAAIRYHHIQAGFHSPTEHPLVIRVMRGLSRNQSRHVSDYDQQPIMYDEVEMLIQAIDEQVQPLTRARDKAIIQLGLQGGFRRSELADIKVQYVSFLRNKLKVRLPYSKSNQQGQREWKDLPDHEPFAALDAVKNWLSLANIEDGHLFRSLSRDGKNLRPYQMKDRHSGSSSLLNKNSGFLTGDDIYRIIKKYCTKAGLPAKFYGAHSLRSGCVTQLHENNKDHLYIMARTGHTDPRSLRHYLKPKD

SEQ ID NO: 1632 - protein, 371 aa, Shewanella baltica
MSKMIRTNSNAQNNTNISNERATGSGHHHNNRAEQPRFFEETFLPQSVRNDYLSAAEETEYEISVNTRRVYNTSFSVFSRYCAEHQLQALPADPRSVISFIGHQKELIQESTGVQLSKQTLTTRLAAIRYHHIQAGFHSPTEHPLVIRVMRGLSRNQSRHVSDYDQQPIMYDEVEMLIQAIDEQVQPLTRARDKAIIQLGLQGGFRRSELADIKVQYVSFLRNKLKVRLPYSKSNQQGQREWKDLPDHEPFAALDAVKNWLSLANIEDGHLFRSLSRDGKNLRPYQMKDRHSGSSSLLNKNSGFLTGDDIYRIIKKYCTKAGLPAKFYGAHSLRSGCVTQLHENNKDHLYIMARTGHTDPRSLRHYLKPKD

SEQ ID NO: 1633 - protein, 371 aa, Shewanella sp. Pdp11
MSKIIRTNTNAQNNTYMSNERATESEHHQNNRAEQPRFFEESFLPQSVRSDYLSAAEETEYEISVNTRRVYNTSFSVFSRYCAEHQLQVLPADPRSVISFIGHQKELIQESTGVQLSKQTLTTRLAAIRYHHIQAGFHSPTEHPLVIRVMRGLSRNQSRYVSDYDQQPIMYDEVEMLIQAIDEQEQPLTRARDKAIIQLGLQGGFRRSELADIKVQYVSFLRNKLKVRLPYSKSNQQGLREWKDLPDHEPFAALDAVKNWLSLANIEDGHLFRSLSRDGKNLRPYQMKDRHSGASSLLNKNSGFLTGDDIYRIIKKYCTKAGLPARFYGAHSLRSGCVTQLHENNKDHLYIMARTGHTDPRSLRHYLKPKD

SEQ ID NO: 1634 - protein, 361 aa, Shewanella sp. UCD-KL12
MSKLTQHLPNSFVSNNGHQQKLTEDNLFFEEQALPISILDDFKSAASETQYEISYNTRRAYQTSFNIFSRYCEQHGLNTLPADPRSVISFIGQQKELINQKTGAQLSKQTLTTRLAAIRFFHIQAGFHSPTEHPLVLRVMRGLSRNQLRVTSDYDQQPILYDELELLIQTIDNQKQTLTKARDKAIIQLGFQGGFRRSELASIQVSHVNFLRNKLKVRLAYSKSNQQGHKEWKDLPEAEPFSAMSAVKLWLDESQIKQGHLFRSLSRDGESLRPYFQAKSDLDQDAGVQKNSGFLRGDDIYQIIRKYCHKAGLSSDLYGAHSLRSGCVTQLHENDKDHLYIMGRTGHTDPRSLRHYLKPKD

SEQ ID NO: 1635 - protein, 354 aa, Shewanella woodyi
MNKMTPFQTGSLLSRPANTEEKQFYEERELPLSILDDYKSAASETEYEISANTRRAYTSSFSLFSNYCSEHRLNTLPADPRTVISFIGYQKELIQSRSGAQLSRQTLTSRLAAIRYFHIQAGYHSPTEHPLVIRVMRGLSRNKQRTVSDYDQQPIMYDELEMLLNVIELQPHAITRARDKAIIQLGFQGGFRRSELADIRVNHLSFLRDKLKVRLPYSKSNQQGQREWKNLPQSEPFAAFDAVKHWLTVSKIQDGHLFRSLTRDGRQVRDYSVATQGIESKKRNSGFLRGDDIYQMIRKYCTKAGLSHEFYGAHSLRSGCVTQLHENDKDHLYIMARTGHTDPRSLKHYLKPKD

SEQ ID NO: 1636 - protein, 347 aa, Unknown
  source: /note="Description of Unknown: Unclassified Shewanella sequence"
MSGKRISPISNKALKTVSDDGFYQEHELPLSILNDFESAAKETRYEISHNTRRVYQSSFGIFVTYCESHGLSSLPADPRSVISFIGHQKDIYQANSGHQLSTQTINSRLAAIRFFHIQSGSPSPTEHPLVIRVMRGLMRNQNRTVADYDQQPIMYDELELLIQTIDERNQNLTKKRDKAILQLGFQGGFRRSELANIKVNHLSFLRDKLKVRLPYSKSNQQGQREWKVLPKEEPFSAFDAVKEWLSAAEIKEGHLFRSLTRDGNQIRDYQITDTNLGKGFLRGDDIYQLIKRYCNKAGLDPQYYGAHSLRSGCVTQLHENKKDHLYIMGRTGHTDPRSLNHYLKPNE

SEQ ID NO: 1637 - protein, 335 aa, Shewanella corallii
MNNQVPEQYHQESNLPSSILDDFHNAAAETEFEVSANTRRNYATSFSIFQDYCQHHGMSALPADPRAVISFIGHQKDLYLESGVQLSKATLISRLAAIRFYHLQAGFRTPTDHPMLLRIMRGISRNQYRQQAHYDQQPIMYTELSRLLSAVDSQQSALLKMRDKALITLGFQGGFRRSELASLQTQHLTFLHDRLRVRLAFSKSNQQGGKEWKDLPYSEQFAAADYVRRWLEISQLSSGHLFRSISRCGKFTRPYERKMPGSSGRNSGFLNGDDVYRTVRKYCKIAGLGESWFGAHSLRSGCVTQLHENDKDTLYIMGRTGHTDPRSLRHYLKPK

SEQ ID NO: 1638 - protein, 354 aa, Shewanella sp. Alg231_23
MNKMTPFQTGSLLSRPANTEEKQFYEERELPLSILDDYKSAASETEYEISANTRRAYTSSFSLFSNYCSEHRLNTLPADPRTVISFIGYQKELIQSRSGAQLSRQTLTSRLAAIRYFHIQAGYHSPTEHPLVIRVMRGLSRNKQRTVSDYDQQPIMYDELEMLLNVIEQQPHAITRARDKAIIQLGFQGGFRRSELADIRVNHLSFLRDKLKVRLPYSKSNQQGQREWKNLPQSEPFAAFDAVKHWLTVSKIQDGHLFRSLTRDGRQVRDYSVATQGIESKKRNSGFLRGDDIYQMIRKYCTKAGLSHEFYGAHSLRSGCVTQLHENDKDHLYIMARTGHTDPRSLKHYLKPKD

SEQ ID NO: 1639 - protein, 380 aa, Shewanella sediminis
MSKSACHTINSILTPNTSIVPSGTNGNSNASDEKFFEETQLPLSILDDYKSAASETEYEISENTRRVYTSSYAIFNRYCLEHGLSPLPADPRSVISFIGHQKESIQQSSGAQLSRQTLTSRLAAIRYHHIQAGFHSPTEHPLVIRVMRGLSRNKYRKVADYDQQPIMYDELEMLIDVINQQPQPMTRARDKAIIQLGFQGGFRRSELADIQVNHLSFLRNKLKVRLPYSKSNQQGQREWKDLPQTEPFAAFDAVKEWIEVSKIKQGHLFRSISRDGSQIRPYSVSDTTNRKINQTSMDNEELPLSRSNRNCGFLRGDDIYQMIKKYCARSGLSPEFYGAHSLRSGCVTQLHENDKDHLYIMARTGHTDPRSLRHYLKPKD

SEQ ID NO: 1640 - protein, 362 aa, Shewanella canadensis
MVPSGTNGNRNASDEQFFEETQLPLSILDDYKSAASETEYEISENTRRVYTSSYAIFNRYCLEHGLSPLPADPRSVISFIGHQKESIQQSSGAQLSRQTLTSRLAAIRYHHIQAGFHSPTEHPLVIRVMRGLSRNKYRKVADYDQQPIMYDELEMLIDVINQQPQPMTRARDKAIIQLGFQGGFRRSELADIQVNHLSFLRNKLKVRLPYSKSNQQGQREWKDLPQTEPFAAFDAVKEWIEVSKIKQGHLFRSISRDGSQIRPYSVSDITNRKINQTSMDAKEHSLPRLNRNSGFLRGDDIYQMIKKYCARSGLSPEFYGAHSLRSGCVTQLHENDKDHLYIMARTGHTDPRSLRHYLKPKD

SEQ ID NO: 1641 - protein, 353 aa, Shewanella halifaxensis
MKGQIQFNQALVSQQHVDNDSSEKFFQEQQLPISILDDFKSAASETQYEISANTRRVYQSSFAIFKSYCELHNLSALPADPRSVISFIGHQKEVYQEKSGHQLSKQTINTRLAAIRFFHIQAAHHSPTEHPLVIRVMRGLMRNQYRHTSDYDQQPITYDELEMLLAVIDQQPQQLTRLRDKAILQLGLQGGFRRSELAEVKIEHISFLRDKLKVRVPYSKSNQQGQREWKDLPKHEDFSAYDAVQHWLDATKLKQGHLFRSLSRDGNSIRDYQITQGKNGKGFLKGDDIYQMIKKYCDKAGLNSRFFGAHSLRSGCVTQLHENDKDHLYIMARTGHTDPRSLRHYLKPKDGYS

SEQ ID NO: 1642 - protein, 350 aa, Shewanella fidelis
MKGQIQFNQALVSQQQVDSDSSEKFFQEQQLPISILDDFKSAASETQYEISANTRRVYQSSFAIFKSYCELHNLSALPADPRSVISFIGHQKEVYQEKSGHQLSKQTINTRLAAIRFFHIQAAHHSPTEHPLVIRVMRGLMRNQYRHTSDYDQQPITYDELEMLLAVIDQQPQQLTRLRDKAILQLGLQGGFRRSELAEVKIEHISFLRDKLKVRVPYSKSNQQGQREWKDLPKHEDFSAYDAVQHWLDATKLKQGHLFRSLSRDGNSIRDYQITQGKNGKGFLKGDDIYQMIKKYCDKAGLNSRFFGAHSLRSGCVTQLHENDKDHLYIMARTGHTDPRSLRHYLKPKD

SEQ ID NO: 1643 - protein, 288 aa, Candidatus Omnitrophica bacterium CG1_02_49_10
MDKYISRFTNYLKVEKNYSGHTVKNYLVDLKAFKGFAQDTDIAKIDHLFLRRYLASMRSSGYSKRTIARKLATLRSFFRFLCTDGYLKDNPISGISTPKLDKKLPIFLDVDTVFRLLESPGRDISGLRDRAIMETLYSTGIRVSELAGLKMENVDFIGEVIKVFGKGRKERMIPIGNKAVNSIRAYMDERGRLGIDRKELFLNKSKRPLSIRGIRRVIDKHIKNTSAKEHVSPHTLRHSFATHLLDRGADLRSIQELLGHMNLSTTQIYTHVTTERLKSVYDKTHPRA

SEQ ID NO: 1644 - protein, 421 aa, Lactococcus piscium
MNIEKIARKGKPTVEKRTKQDGSISYRYTGYYLGIDEVTRKKVNATITGQTLKELDRNMIKARLDFERNGHTKKEQLQITLFSELAEEWFVSYKLITSSENTNNRVRGYLDTYIIPRFGDYLPDKIKPIDVQKWVNECAAKARQVAAEGRRAKKGEAKDFGAALYKLRDIFDYGITNFGLKKNPATTVQVPPKPKENKVKVKVLHDDELKIWLKHLSSLPNNQANRRFKLICETLLASGIRINELLALTIDDLNFETSELDINKTLMWKAADKKTGIKGKVICKPSPKSDAGCRKVDVPPKILERLKAWHDEVSERFEKIGLDKPSLIFPTVYGAYMCDRNERTTLKKQLTACGLPLYGFHIFRHTHASLLLNAGTNWKELQVRMGHKSIATTMDLYAELAPKKKAEAVNIYLDKIDELTA

SEQ ID NO: 1645 - protein, 408 aa, Enterococcus sp.
MPTKLSNGKYKTNLRYPKRFKEITGIASEKYQKTFPNRQLAIKAENDMKKKIEKVLREENANSLELKGKITFKKFYESKWLPRYELGQTIRSNRPPSDITISNTKDIFRLHILPMFGEYAMNYLNINTEIISDELTKKSKEYANIKIIKGYVRSMFDIAEILNYIEFNRTTKIIQSITAPKKNALEEKRIQEGKQALSSKELTNWIEAVNDDFNNHLLTFHDYTLFMITLYLGDRKSETYALQWKYIDFEKQTVRLKHTLDKYQRKKFTKGRKDTVIQVPEVVMTLLSEWKSVQADQLLKLKIKQTLDQYLFTYTKPSGEVNCPVHADYLNYRINSIKRRHPDLVHLSPHKLRHTYATIARQGGADMNQISNALTHSDISTTKIYVNTPDIVDKAVFEAFQRGLNKCD

SEQ ID NO: 1646 - protein, 209 aa, Bacillus anthracis
MRSEDIPLFLKTSYQYNYIYYIFFKALLNTGMRKGEAAALQWKDINLKEHTIIISKTLDFTAKTKEELFGDTKTFTSKRTIMIPKSLVDELLAHKKWQNANKLVLQDAYEHELDLVFSRVDGKFLPKSTLFNAFSRILKKANLPRLEIHSLRHTHAVLLLESGASMKYIQDRLGHKSIEITSNVYSHISDKINKDSISGFEAYMNNVLG

SEQ ID NO: 1647 - protein, 209 aa, Bacillus sp.
MRSEDIPLFLKTSYQYNYIYYIFFKALLNTGMRKGEAATLQWKDINLKEHTITISKTLDFTAKTKEELFGDTKTFTSKRTIMIPKTLVDELLAHKKWQNANKLVLQDAYEHELDLVFSRVDGNFLPKSTLFNAFSRILKKANLPRLEIHSLRHTHAVLLLESGASMKYIQDRLGHKSIEITANVYSHISDKINKDSISGFEAYMNNVLG

SEQ ID NO: 1648 - protein, 211 aa, Bacillus sp.
MCSSYQRAPDLVKTSYQYNYIYYIFFKALLNTGMRKGEAAALQWKDINLKEHTITISKTLDFTAKTKEELFGDTKTFTSKRTIMIPKSLVDELLEHKKWQNANKLVLQDAYEHELDLVFSRVDGNFLPKSTLFNAFSRILKKANLPRLEIHSLRHTHAVLLLESGASMKYIQDRLGHKSIEITANVYSHISDKINKDSISGFEAYMNNVLG

SEQ ID NO: 1649 - protein, 384 aa, Unknown
  source: /note="Description of Unknown: Bacillus cereus group"
MASFRKYQTKDGAKWLYKIYTTIDPKTGKKKQTTKRGFKTKKEAQLHAAKAETELSNGTFIEDKNVMISTFLNDWLITYKKGKVRNHTYNLHKTAINKHIVPFFGSYKVFDITPSLCQKFVNHLLEEGYSENSVKNYTAPLKGALLKAVDLQLIQQTPFRGIVIAKSDTEDKKIKHLEGQEVNTFVQKLKDTEPHYFSLFFTLLHTGIRKGEALALRWDDIDLEEGTISIRHTFTYDYKNLDNLFAKPKTKASYRTIILADFLIQILKNHKLEQNKCKLKLGGLYHDLSLVFARENGLPYPKSTLQRAMTRILKKANVTNITIHGLRHTHAVLLLDAGYSMKEVQERLGHDSIQITSDIYAHISKEMNKKSLNKYEAFAKRNLL

SEQ ID NO: 1650 - protein, 403 aa, Pelobacter propionicus
MPKRIAPLSDLQVRNAKPKEKQVTLFDGGGLYLLITPTGGKLWRLKYSLFGKEKLLALGTYPEISLADARQRREDARKQVANGIDPGEVKKAQKVSSGEGDENSFEVIAREWHGKFLLNKSESYRDKMLSNFERDVFPWIGRVAVKNLKAPELLSALRRIEGRGALETAHRTRSACSQVLRYAVATGRAERDCASDLIGALPPYKKGHRAALTDPKEVAPLLRAIDDYQGTFPVKCALKLAPLLFVRPGELRKAEWSEVDFKATEWRIPGDKMKMKNDHIVPLASQAVEILKELYPLTGHSKFLFPSPRSPLRPMSDNAILSALRRMGFEKDEMSGHGFRAMARTILDEVLHVRPDFIEHQLAHAVRDPNGRAYNRTAHLAERKKMMQAWADYLDDLKTRNGI

SEQ ID NO: 1651 - protein, 485 aa, Acidovorax temperans
MAKVTVRKETGKLVMDFTYCNVRCREQTALPDTLQNRKRVEAVLEKIKKALKNGTFQYRDYFPESALASRFDQATTVDAGKAMQSPVNSPSPLFQDFATQWFKEHEIEWRRSHIRSLRSTLDGRLIPHFGQKVVSSITKSDILAYRATLAKVKGRGDKEGLSPKRINEIIGTLCQIIDEAADRFEFTTPTTNIKRLRVRKVDVDPFSLQDVQSILATVRADYRNYFTVRFFTGMRTGEVHGLKWRYVDFERRLIRVRETVVLGEDEYTKTDGSQRDIQMSQPVVEALTKQYEVTGKLSDYVFCNLMGAPLDNKNFTDRVWYPLLRHLGLTERRPYQMRHTAATLWLASGEAPEWIARQLGHTSTEMLFRVYSRYVPNLTRQDGSAMERLLASRLATGKVLRMDRAHLQQVGDSNLFAEAGGSERATMPVPKPRGVAVGALERARTNWSRTSQDITLPERHAGEDPQPPPPGAMRTHVRRLNPLHA

SEQ ID NO: 1652 - protein, 431 aa, Unknown
  source: /note="Description of Unknown: Firmicutes sequence"
MAKGSVRKKGKKWYYRFYVEDASGNLVQKECVGTESKSETEKLLRQAMDDYEKKKFVAKAENLTVGQLLDVWAEEELKTGTLSNGTVENYLGTIRNIKKHPLAERKLKNVTSEHLQSFFDLLSFGGVHPDGKERKGYSKDYIHSFSAVMQQSFRFAVFPKQYITFNPMQYIKLRYQTDEVDLFSDEDMDGNIQPISREDYERLLAYLQKKNPAAILPIQIAYYAGLRIGEACGLAWQDVNLEEQCLTIRRSIRYDGSKRKYIIGPTKRKKVRIVDFGDTLVEIFRNARKEQLKNRMQYGELYHTNYYKEVKEKNRVYYEYYCLDRTEEVPADYKEISFVCLRPDGCLELPTTLGTVCRKVAKTLEGFEGFHFHQLRHTYTSNLLANGAAPKDVQELLGHSDVSTTMNVYAHSTRDAKRKSVRLLDKVVGND

SEQ ID NO: 1653 - protein, 332 aa, Pedobacter sp. Leaf194
MSAYINSKISNWEMFMLHQQSLGKPTTLNIAIGYFKGNAEVTLFGFWEEQLRLWEYEKKPATIKSYKSTLNILRHFNNKLNFGDLTYDCIQKFDLYLRKERNNATNGCFVKHKCLKHMIKESISKGFMDKSPYEHFKVRSTKGTRMFLTIDEVNAIDDLQISKDNTFLQKSKDLFLFSCFTGLRYSDVVNLTWGNIKQNPDRIEIKIIKTEKPLLVPLISKAKDILNKYSKLTIKTDSLKALPQQANQVVNRNLKEIMMLAGIKKSISFHCARHSFASNLVEMNTPILYVKDLLGHQKIEQTMIYAKSIVGNLFDSMNNLNEKYHHVNKHVG

SEQ ID NO: 1654 - protein, 303 aa, Myroides odoratus
MSTKIWQNTLQSYIHYLKLERGLAENSIESYELDLLKFVQFLSHSEIEVAPKNVTPAHVNEFVYQLSTVLAPTSQARIISGLKSFFTFLLVDGQIEKAPTDLLEIPKLGRKLPEVLAMEEIDALLATLDLSTNEGYRNKVMLELLYSCGLRVSELVNLRLSDLFFEEGFIRVIGKGSKHRFVPIDPDTMELIIMYKQSIRNHMQVKKEDTDIVFLNRRGGRLTRAMIFTIVKQAAQEANIQKNVSPHSFRHSFATYLLENGADIRMIQLMLGHESILTTEIYTHISREKLKGVMDRYHPRSRQ

SEQ ID NO: 1655 - protein, 377 aa, Myroides profundi
MNITLKQRKLPSGRISLLIEYTKGVEVTSTGKKKYIREFENLKLFLHGAPNSPKERKENKEALQMAENILAIRQSENLRGKYGIKNKHKGQRCFLDFFLEKTEEKYESPKNYGNWTASFLHLKRCISPTLTFDEVDDDFLKRVREYIDKKALTKSKLPLSLNSKYSYLNKFRAALRLAFEEGYLTINYAQKVKSFKQAESQREYLTFNEVQRLVETDCKYEVLKRAFLFSCLTGLRWSDINKLVWSEVRDEDDVCRVIYRQEKTEGVEYLYISKQARELLGERESLNQLVFTNLKYSAIYNNEIVRWCNRAGIHKHITFHSARHTNAVLLLENGADIYTVSKRLGHREIRTTQIYAKIIDSKMKEASELIPELKFGF

SEQ ID NO: 1656 - protein, 312 aa, Psychrobacter arcticus
MSRDRAVQQRQPKALAVDDEPAYMTEFRQAMLARGLATRTRNAYVRDLRSCELTNHAALTRWQPEDVLCCLSILTQDGKTPRTQARMLSSLRQFYLWMIASNLREDNPCERIKSPKLGRPLPKDLAEADVDNLLAAPDSSTALGLRDKAMLEVLYACGLRVSELVNLSLEQVNLNSGWLQITGKGNKTRLVPLGEYASDALEDYLTHGRGDLIAHLKAGNCQAVFLTAQGGYMTRQNFWYLLKKYAKVASIDKALSPHTLRHAFATHLLNHGADLRSVQLLLGHSNLSTTQIYTHVATARLQKLHAEHHPRG

SEQ ID NO: 1657 - protein, 370 aa, Clostridium phage phiCD211
MNAFIRKRNKNYVVYLEFRDDESGKRKQKNMGAFDKKRDANKRLAEVKDSIYKDSFLVPNEITLAGFLLDFLEKYKDNISASTYKSYIAICKNHINPSIGKYRLQELRNIHIQNYIDDLAGNLNPQTIKVHINVLRLAIKRAYRIKLIKENIIDGIESPRIKKFKNEIYDKEHMLKLLEVAKGTNLELPISLAIGLGLRLSEVLGLTWDNIDFDENTITVNKITSRLDGSVILKEPKTESSVRKIFAPIELMNLLKNYRLEQNKKLLRSIVRNEYNLLFFDRKGNPIAEDVMSKKFRKFLENNDLPHIRFHDLRHSHVTLLINSKVPIKVISERVGHSNINTTLNVYSHVLKEMDKEASDRISENLFKAN

SEQ ID NO: 1658 - protein, 320 aa, Pseudomonas sp. A214
MDKAQRYLTAGTRENTRKSYRAAVEHFEVTWGGYLPATAEGIVRYLAEYAETLSLSTLRQRLAALAQWHVSQGFPDPTKAPHVRQMLKGIRVVHPTRQKQAAPLQLRHLEKAVNWLNSKAADAVESGDYRALMRYRRDAALLLIGFWRGFRSDELARLQVEDTQAEAGIGITFYLPYTKADRDHQGSTFHTPALKKLCPVEAYINWITVAGMTRGPVFRKLDRWGNLSEKGFKSTSLIPLLRRILEEAGIPAQSYSSHSMRRGFATWASANGWDIKGLMSYVGWKDMKSALRYVDASNSFGGLAAFSPGRIDHDDPESSS

SEQ ID NO: 1659 - protein, 313 aa, Pseudomonas fluorescens
MVEVASKADRYLEANIRENTSKSYAAALTHFEVTWGGYLPTTTESVVRYIAEYADQLALSTLKQRLAALANWHQSNGFPDPTKAPKVRQLLKGIRAVHPVQQKQAAPLALLHLEKAVAYLEDEVAQARAVGNMAALLKGTRDIALLTIGFWRGFRGDELARLTIENTHAERYVGIRFYLGSTKGDRQNIGREYKTPSLSKLCPVEAYLTWIEAAGLTRGGVFRAIDRWGNISDCPIAAHSLIPLLRDTLDRCGLPSEIYSAHSIRRGFATWAASSGWDIKTLMEYVGWSDMKSALRYVEPAQQFGGLIRKLEG

SEQ ID NO: 1660 - protein, 338 aa, Unknown
  source: /note="Description of Unknown: Unclassified Pseudomonas sequence"
MTANNKDEGVPSILFGERAAQARTHGTLATPEQLAQQHQRFLAAATSDNTRRTYRSAIRHFQAWGGGLPCDEALVIRYLLAFAEVLNPRTLALRLTALGQWHRYQGFPDPAASATVRKTLRGIERVNGRPRQKAKALLLGDLELIVAHLDTLEGLAALRDSALLQVGYFGAFRRSELVTLEVRDLQWEREGLRITLPRSKTDQEGEGLERAIPYGDSLCCPAKALRSWLEAAQIEQGPLFRRISRWGVVGKVALYEGSVNSILAARAGAAGLLYVPEMSSHSLRRGLATSAYRAGADFLEIKRQGGWRHDATVHSYIEEARAFEENAAGSLLRRKPST

SEQ ID NO: 1661 - protein, 383 aa, Weissella paramesenteroides
MKLPKGIDLMPSGKYKATASIGSGNTRKRKSKSFTTVSDAKAWLLEMNADMHSGTTYVGDDAKITDAYNEWVATFVTSKVSPATEKGYYFTGKILAKYCEGWLVKTLDRRHCQKLFNQLIADNYTKNTIKKIKVHVGKYCRSLVTEGVIKRNPMQEIDIRGARLGKDANQKFISISQYKQLLQALKQRPISQMTPYTMVILVILCTGMRVSEAIDLRQDDLDEIKLTLRVDSSYSRTVHDSKAPKTKNSYRTIPIPKFLLQRLREWRFEQNRLLMLNGHRNHEQHLFITKFGNVPDASSVNYYVQKLEHTICQIPVGQTTSTHSLRHTYASYLLSREGGNQSLQYVANVLGDTQAMVQEVYAHLMPEEKASQANVVRDALEVI

SEQ ID NO: 1662 - protein, 377 aa, Pseudomonas sp. AP19
MLNVLNITDQLPLVDETLLEPHFLALNAQEAAAAFIAAGTAANTVRSYRSALAYWSAWLQLRYGQALGDAPLPVAVAVQFVLDHLARPLADGAWAHLLPPSIDTALVAAGIKARLGPLAFNTVSHRLAVLGKWHRIKGWDSPSEASVLKTLLREARKAQSRQGVNVRKKSAIVLEPLQALLATCTDGARGVRDRALLLLAWSGGGRRRSEVVGLQVSDVRQLDADTWLYALGTTKTDTTGVRREKPLRGQAAQALAAWLAAAPAESGPLFRRLYKGGKIGTSGLSADQVARIVQRRAQLAGLEGDWAAHSLRSGFVTEAGRQGVPLGEVMAMTEHRSVTTVMGYFQAGALLESRASQLYGEPPPAEVLINKPKVEAD

SEQ ID NO: 1663 - protein, 386 aa, Pseudomonas chlororaphis subsp. aureofaciens
MKDYPTLFGRYWNYNTLNVIDITDQLPLVDEIPLDPHALALNAQEAAAAFIAAGTAANTVRSYRSALAYWSAWLQLRYGQTLGDAALPPTVAVQFVVDHLARPLANGNWTHLLPPSVDAALVAARVKAKPGPLAYNTVSHRLAVLGKWHRLNGWDSPTEAPALKTLLRDARKAQSRQGITVRKKTAVVVEPLQALLATCSDGVRGVRDRALLLLAWSGGGRRRSEVVGLQIGDVRRLDADTWLYALGATKTDTGGIRREKPLRGPAAQALTAWLTVAPADDGPLFRRLFKGGKVGTQGLSADQVARIVQRRAQLAGLDGDWAAHSLRSGFVTEAGRQGVPLGEVMAMTEHRSVSTVMGYFQAGSMLSSRATCLLEDEERHRSDQNA

SEQ ID NO: 1664 - protein, 404 aa, Pseudomonas sp. NFIX28
MKDYPTLFGQYWNYNTLDVIDITDQLPLVDEMPLDPHALALNAQEAAAAFIAAGTAANTVRSYRSALAYWSAWLQLRYGQALGDAPLPPTVAVQFVVDHLARPLADGNRAHLLPPSVDAALVAARVKAKPGPLAYNTVSHRLAVLGKWHRLNAWNSPTEAPALKTLLRDARKAQSRQGITVRKKTAVVVEPLQALLATCTDGVRGVRDRALLLLAWSGGGRRRSEVVGLQIGDIRKLDADTWLYALGATKTDTGGVRREKPLRGPAAQALTTWLAAAPAESGPLFRRLHKGGKVGATGLSADQVARIVQRRAQLAGLEGDWAAHSLRSGFVTEAGRQGVPLGEVMAMTEHRSVSTVMGYFQAGSLLGSRATQLLGPTQIASEAALEQTAGSTVFCEPTMTSTGD

SEQ ID NO: 1665 - protein, 370 aa, Pseudomonas chlororaphis subsp. aureofaciens
MNVIDITDQLPLVDEIPLDPHALALNAQEAAAAFIAAGTAANTVRSYRSALAYWSAWLQLRYGQTLGDAALPPTVAVQFVVDHLARPLANGNWTHLLPPSVDAALVAARVKAKPGPLAYNTVSHRLAVLGKWHRLNGWDSPTEAPALKTLLRDARKAQSRQGITVRKKTAVVVEPLQALLATCSDGVRGVRDRALLLLAWSGGGRRRSEVVGLQIGDVRRLDADTWLYALGATKTDTGGIRREKPLRGPAAQALTAWLTVAPADDGPLFRRLFKGGKVGTQGLSADQVARIVQRRAQLAGLDGDWAAHSLRSGFVTEAGRQGVPLGEVMAMTEHRSVSTVMGYFQAGSMLSSRATCLLEDEERHRSDQNA

SEQ ID NO: 1666 - protein, 336 aa, Pseudomonas sp. KG01
MGYWRIIPCHNPFNRQCTCHQYEKAPMSDLDRYLNAATRDNTRRSYRAAIEHFEVSWGGFLPATSDAVARYLVAHAGVLAVNTLKLRLSALAQWHTSQGFPDPTKAPVVRKVLKGIRAVHPVREKQAEPLQLKHLEQVVAFLETDALQASATQDPPRLLRAKRDTALILLGFWRGFRSDELCRLSIEHVQAVPGAGISLYLPRSKSDRDNLGRTYQTPALLRLCPVQAYSEWLSASALVRGPVFRGIDRWGNLGEEGLHPNSVIPLLRQALERAGIPAEQYTSHSLRRGFATWAHRSGWDLKSLMSYVGWNDMKSAMRYVEATPFLGMTLATPALI

SEQ ID NO: 1667 - protein, 383 aa, Pseudomonas sp. OV286
MNVLDITDQLSLVNETSLHPQFLALNAQEAAAAFIAAGTAANTVRSYRSALAYWSAWLQLRYGHVLGDAPLPAAVAVQFVVDHLARPTADGEWVHLLPASIDAALITAKVKAKPGAQAYNTVCHRLAVLGKWHRLNSWDSPTEVPALKSLLREARKAQSRQGLSVRKKTAIVLEPLQALLATCTDGLRGQRDRALLLLAWSGGGRRRSEVVNLQISDVRQLDTDTWLYTLGATKTDTGGIRREKPLRGPAAEALTAWLKAAPAQSGPLFRRMYKGDKVGATGLSADQVARIVQRRAKLAGLDGDWAAHSLRSGFVTEAGRQGVPLGEVMAMTEHRSVSSVMGYFQAGALLESRATTLLKSSTVGDEGPLKSLYVGANEDAEHP

SEQ ID NO: 1668 - protein, 377 aa, Pseudomonas oleovorans
MNVLNITEYLSLANETQLDLHSLAINAQEAAAAFIASGTAANTLRSYRSALAYWSAWLQLRYGQALGDAALPSSVAVQFVVDHLARPTADGGWAHLLPPTIDAALVAARVKAKLGPLAYNTVSHRLAVLGKWHRINGWGSPTETVALKALMREARKAQSRHGVSVRKKTAIILEPLQALLATCTDGVRGVRDRALLLLAWSGGGRRRSEVVGLQIGDVRRLDADTWLYALGTTKTDTGGLRREKPLRGPAALALAAWLEVAPAESGPLFRRIYRGGKVGPQGLSADQVARIVQRRAQLAGLDGDWAAHSLRSGFVTEAGRQSVPLGEVMAMTEHRSVTTVMNYFQAGSLLSSQASQLLGPAVGATASAERSDSDSSP

SEQ ID NO: 1669 - protein, 378 aa, Pseudomonas chlororaphis subsp. piscium
MNVIDITDQLPLVDEMPLDPHVLALNAQEAAAAFIAAGTAANTVRSYRSALAYWSAWLQLRYGQVLGDAPLPPAVAVQFIVDHLARPEAGGSWTHLLPPSIDAALVTARVKAKVGPLAYSTVSHRLAVLAKWHRLKDWDNPGDAPAVKTLLREARKTQTRQGVNVRKKTAIVLEPLQAMLATCTDGVRGVRDRALLLLAWSGGGRRRSEVIGLLVEDLRRLDANTWLYALGATKTDTGGVRREKPLQGPVAQALAAWLAAAPASSGPLFRRLYKGGRVGSAGLSGDQVARIVKRRAALAGLDGDWAAHSLRSGFVTEAGRQGVPLGEVMAMTEHRSVSTVMGYFQAGSLLGSRASQLLPITQEDDGGNSELLTTGDSH

SEQ ID NO: 1670 - protein, 377 aa, Pseudomonas sp.
MNVLNITEHLSLANETQLDLHSLAINAQEAAAAFIAAGTAANTLRSYRSALAYWSAWLQLRYGQALGDAALPSSVAIQFVVDHLARPTAGGGWVHLLPPTIDAALVAARVKAKLGPLAYNTVSHRLAVLGKWHRINGWGSPTETAALKALLREARKAQSRHGVSVRKKTAIILEPLQALLATCTDGVRGIRDRALLLLAWSGGGRRRSEVVGLQIGDVRRLDADTWLYALGTTKTDTGGLRREKPLRGPAALALAAWLEVAPAESGPLFRRIYRGGKVGTQGLSADQVARIVQRRAQLAGLDGDWAAHSLRSGFVTEAGRQSVPLGEVMAMTEHRSVTTVMNYFQAGSLLSSQASQLLGPAVGATASEERSDSDRSP

SEQ ID NO: 1671 - protein, 373 aa, Unknown
  source: /note="Description of Unknown: Unclassified Pseudomonas sequence"
MNVLEITQQLPLSDEPLLEPHLLAESAQEAAKAFIAGGTAANTVRSYQSALTYWSAWLRLRYGVALGDKALPAELVIQFIVDHLARPLEDGSWTHLLPASIDAALVAARVKAKPGPLAHSTVSHRLAVLSKWHRLNDWDSPVEMPAVKTLLRDARKAQVRQGITVRKKTAVVAEPLQAMLATCTDGVRGIRDRSLLLLTWSGGGRRRSEVVAMQIGDVRALDADTWLYALGATKTDSSGARREKPLRGQAAVALAEWLAVAPADSGPLFRRMFKGDKVSTLGLSTDQVARIVKRRAKLADLDGNWAAHSLRSGFVTEAGRQGVPLAEVMAMTEHRSVGTVMGYFQVGTLLNSRATTLLAEPLTPPDQREHEHG

SEQ ID NO: 1672 - protein, 367 aa, Unknown
  source: /note="Description of Unknown: Unclassified Pseudomonas sequence"
MNNTDALQARFDNPLALHEIADTTRAAAEAFIAAGTAVNTVRSYRSALAYWAAWLRLRYGRALGDGALPPEVAVQFIVDHLARPNADGTWSHLLPANVDAALVAAGVKGKLGALAFSTVSHRLAVVAKWHRLKDWDNPCEAAAVKTLLREARKAQARQGMAVRKKTAVVLEPLQRMLTTCTDGVRGIRDRALLLLAWSGGGRRRSEVVGLQIEDLRRLDTDTWLYALGATKTETSGIRREKPLRGPAAQALAAWLAIAPAVSGPLFRRLYKGGKVGTAALSADQVARIVQRRAQLAGLEGDWAAHSLRSGFVTEAGRQGVPLGEVMAMTEHRSVNTVTGYFQAGAMLSSRATCLLGDEELHRPDQNA

SEQ ID NO: 1673 - protein, 373 aa, Pseudomonas sp. 21
MNNTILPLHGEIAPLAVDRLDAEARAAAAAFVAAGTAANTVRSYRSALAYWAGWLQLRYRRHLEDGALPEAVAVQFLVDHLARPVEGDWQQLLPPALDAALVESGVKAKPGPLSYNTVRHRLAVLAKWHDLKSWPSPTDSAAVKTLLREARKAQSRQGVSVRKKTAAVREPLEAMLATCTDGVRGLRDRALLLLAWSGGGRRRSEVVGLQIGDVRPLDADTWLYALGATKTKTEGVRRELPLRGSAAQALTEWLAAAPATTGPLFRRVYKGGRVGTDELSGDQVARIVKRRAVLAGLPGDWAAHSLRSGFVSEAGRQGVPLGEVMAMTEHRSIPTVMGYFQAGTLLNSRAAHLLALPLNTQADASKSSETRQA

SEQ ID NO: 1674 - protein, 377 aa, Pseudomonas alkylphenolica
MNNTLPLDGLPNTPLALHGLADSTRAAAEAFISAGTAANTVRSYQSALSYWSAWLQLRYRRSLGDGALPPDVAVQFIVDHLARPDGDGNWSQLLPPQLDAALVAAGVKGKLGALAFSTVSHRLAVLAKWHRLNAWDNPCEASAVKTLLREARKAQARQGVALRKKTAVVLEPLQAMLATCSDGVRGIRDRALLLLAWSGGGRRRSEVVGLQVEDLRRLDADTWLYALGVTKTDTGGVRREKPLQGPAAHALQGWLEAAPARSGPLFRRLYKGGRVGSAGLSGDQVARIVKRRAALAGLEGDWAAHSLRSGFVTEAGRQGVPLGEVMAMTEHRSVNTVMGYFQAGSLLGSRAANLMGNESVDTERAPDHTTTHTKPNH

SEQ ID NO: 1675 - protein, 367 aa, Pseudomonas aeruginosa 148
MNNTESLQPSIDTPLAPHELAASTRAAAEAFIAAGTAANTVRSYQSALAYWSAWLRLRYRRALGDAALPPEVAVQFIVDHLARPGADGGWSHLLPADLDAALVVMGVKGKLGALAFSTVSHRLAVLAKWHRLKQWDNPTETPAVKTLLREARKAQVRQGVAQRKKTAVVLEPLQAMLATCSDGVRGVRDRALLLLAWSGGGRRRSEVIGLQIEDLRRLDADTWLYTLGATKTDTGGVRREKPLQGPAAQALSAWLEAAPACRGPLFRRLYKGGRVAPHGLSGDQVARIVKRRAAMAGLDGDWAAHSLRSGFVTEAGRQGVPLGEVMAMTEHRSVSTVMGYFQAGALLDSRASKLLGSTPGASEPPPE

SEQ ID NO: 1676 - protein, 367 aa, Pseudomonas sp.
MNNTESLQPSIDTPLAPHELAASTRAAAEAFIAAGTAANTVRSYQSALAYWSAWLRLRYRRALGDAALPPEVAVQFIVDHLARPGADGGWSHLLPADLDAALVAMGVKGKLGALAFSTVSHRLAVLAKWHRLKQWDNPTETPAVKTLLREARKAQVRQGVAQRKKTAVVLEPLQAMLATCSDGVRGVRDRALLLLAWSGGGRRRSEVIGLQIEDLRRLDADTWLYTLGATKTDTGGVRREKPLQGPAAQALSAWLEAAPACRGPLFRRLYKGGRVAPHGLSGDQVARIVKRRAAMAGLDGDWAAHSLRSGFVTEAGRQGVPLGEVMAMTEHRSVSTVMGYFQAGALLDSRASKLLGSTPGASEPPPE

SEQ ID NO: 1677 - protein, 374 aa, Pseudomonas sp. S06B 330
MNNTDPFEVLPIAPLALHGLADSTQAAAEAFIAAGTAANTVRSYRSALAYWAAWLQLRYGRAIGDGALPSDVAVQFIVDHLARPDADGDWSQLLPAQLDAALVAAGVKGKLGALAFNTVNHRLAVLAKWHRLNDWDNPCEAPTVKTLLREARKAQARQGVALRKKTAMVLEPLQAMLATCTDGVRGVRDRALLLLAWSGGGRRRSEVTALRVEDLRRLDADTWLYALGATKTDTGGVRREKPLRGPAAQALNAWLAAAPASSGPLFRRLYKGGRVGSASLSGDQVARIVKRRAQLAGLEGDWAAHSLRSGFVTEAGRQGVPLGEVMAMTEHRSVTTVMGYFQAGALLESRASLLFGESPVAETVNEAPPTDVQT

SEQ ID NO: 1678 - protein, 361 aa, Pseudomonas aeruginosa
MQPSIDTPLAPHELAASTRAAAEAFIAAGTAANTVRSYQSALAYWSAWLRLRYRRALGDAALPPEVAVQFIVDHLARPGADGGWSHLLPADLDAALVVMGVKGKLGALAFSTVSHRLAVLAKWHRLKQWDNPTETPAVKTLLREARKAQVRQGVAQRKKTAVVLEPLQAMLATCSDGVRGVRDRALLLLAWSGGGRRRSEVIGLQIEDLRRLDADTWLYTLGATKTDTGGVRREKPLQGPAAQALSAWLEAAPACRGPLFRRLYKGGRVAPHGLSGDQVARIVKRRAAMAGLDGDWAAHSLRSGFVTEAGRQGVPLGEVMAMTEHRSVSTVMGYFQAGALLDSRASKLLGSTPGASEPPPE

SEQ ID NO: 1679 - protein, 361 aa, Pseudomonas aeruginosa
MQPSIDTPLAPHELAASTRAAAEAFIAAGTAANTVRSYQSALAYWSAWLRLRYRRALGDAALPPEVAVQFIVDHLARPGADGGWSHLLPADLDAALVAMGVKGKLGALAFSTVSHRLAVLAKWHRLKQWDNPTETPAVKTLLREARKAQVRQGVAQRKKTAVVLEPLQAMLATCSDGVRGVRDRALLLLAWSGGGRRRSEVIGLQIEDLRRLDADTWLYTLGATKTDTGGVRREKPLQGPAAQALSAWLEAAPASRGPLFRRLYKGGRVAPHGLSGDQVARIVKRRAAMAGLDGDWAAHSLRSGFVTEAGRQGVPLGEVMAMTEHRSVSTVMGYFQAGALLDSRASKLLGSTPGASEPPPE

SEQ ID NO: 1680 - protein, 312 aa, Pseudomonas sp. FW507-12TSA
MSELDRYLQAATRDNTRRSYRAAIEHFEVQWGGFLPATAEGVARYLAAYAGELSINTLKLRLSALAQWHNSQGFVDPTKAPVVRQVLKGIRAVHPAQEKQAVPLQLQDLERVASWLDEQASQALAERCQAGLLRARRDRALILLGFWRGFRSDELCRVQVEHVQAHAGSGISLYLPRSKGDRDNLGRTYSTPALQRLCPVQAYIEWINTAALVRGPVFRAIDRWGNLGEQGLHANSVIPLLRQVLEQAGIAAECYTSHSLRRGFATWAQRSGWDLKSLMAYVGWKDLKSAMRYVEAEPFAGMAQLREKAVAP

SEQ ID NO: 1681 - protein, 296 aa, Roseivivax lentus
MLDWKVALEALDGAYSDATMRAYFADVQAYVSWCDETVCDPLPGSVAQICAFIEDQGRNKAPSTVRRRLYAIRKVHRLLGLPDPTEDEAINLALRRVRRANPVRPQQARGLNASDLERFLAVQPKTPWGLRNAAMLALGYELMTRRSELIALRDSDLELRSDGTLRVLIRRSKADQEGQGRLAFTSVKTADRVRFWQEWRGCVTDWLFCPIYQGQPIDRGLSDTTVKTVIKTAAKRAGFPPEDVRAFSGHSMRVGAAQDLLKRGFDTSAIMRAGGWKSVSVLARYLEVAEQNVWEM

SEQ ID NO: 1682 - protein, 360 aa, Sulfitobacter pontiacus
MPQIIERKRKDGSTAYVAQINIRRNGKWAHRESRTFDKHSSASAWFKKRMKEITAAGADLTAINSKGRTLSTAIDRYITESVKEIGRTKAQVLRSIREYDIASMNCNDIQSHDIVQFAKELGATRTPATVGNYLSHLGAIFAVARPAWGIPLDQQAMKDAFVVCNRLGITGKAKRRDRRPTLDELDALLTMFEDKHRRRPNSLPMHRVVGFALFSTRRQEEITRVAWKGLDQTHNRVFIKDMKHPGDKVGNDVWYDLPAPAINIAMAMPRKKPLVFPYHSDTISAAFTRACKVLEIEDLRFHDLRHEGVTRLFETGETIPQVAAVSGHRSWSSLQRYTHIKQTGDKYEDWKWLQRLTTSN

SEQ ID NO: 1683 - protein, 380 aa, Bacillus okhensis
MGVILMKVITLLTKEGKTRYMLLDHNNEPVQPVLHYLKFKDNSGASRNTLRSFSYHLKLFFEFLEQINKDYRDIGIDEMADFIRWLQNPHQDVKVSPIFPKQPIRKAKTVNIIINTVLGFYDYLMRHEDYSIQLTERLKKQVPGSRKGFKSFLHHINKNKSFTSHILKLKVPKQQPKTLSKDQIALIMNACVNMRDLFLIQLLWESSMRIGEALTLWLEDFEVDARKIHIRDRGELSNLAEIKTVCSPRSIDVSEDLINMYFDYIAQFHTDEVDTNHVFIKLTGENKGQPLEYTDVVALVQRLRKKTGIYFTPHMLRHTSLTELRKAGWRDEHLMNRAGHAHIQTTMQMYIHPSDEDIRKDWENAQDRMKINKENKENNE

SEQ ID NO: 1684 - protein, 356 aa, Aliivibrio salmonicida
MATVAIEKVIGKKAIKYKARVRLTSNRKRIFEQSKTFTKESEAKNWATKLAKQLNKSGVPTEKQKTILIGDLITKYLIDPVTSASIGRSKYAVLSRLRAYDIALIQADLLTAHDLINHCRVRKEESTHPLPQTIYHDITYLKSVIDVAEPMFGYIANTKAHHDAIPTLVRYDLIGRSQRRERRPTNKELVTMEQGLTRRQSHRCANIPLVDIFHLSIMTCMRLGEITRITWDDVDFKASTLTIRDRKDPRNKHGNNCIIPLYQKVKEIIERQPKVGTLIFPYKKESIGAAWQRVCKEEGIEDLHYHDLRAEGACQLFERGLNIVEVSKITGHKDINVLNNVYLRLGISEIHHNLSS

SEQ ID NO: 1685 - protein, 386 aa, Bacillus cereus
MEFDIIKINNQTSLKQIEKYKKRFANILSLWNDNVLDEAELRKETNERDDKQTYEGFSDEEILYYYLNRQTHFDKEKRIKDNSRTLYARDLSQFYFFIKQSKEFLQQDVKDYEEGYMWGNLRKRHIRSYQKWLSQEAISYQSNQRYKPSTVSRKLGIIRSFLKWLYEIQYIQDPLHVEILSTTVAKLHKPKRDLSYEEVKQLLNYYKGNEINYALVSFLATTGLRIAEVAHAKWKDIEYDSVRNRYYLRVDTKGDDERIVSINKEIFQRIISFRIRRRLTIDLGNQDGGTIFQTKNHTAYRENYLSQYITKIIKDTGLPFTKNIRITPHFFRHFYVQYLYDYKGLPPHLIAAAVGHKDDRTTKENYLKQRLTKDSDAGNLIGENEF

SEQ ID NO: 1686 - protein, 322 aa, Vibrio crassostreae
MILKKNANYYSSLAPNQVFDSERKAMQLEKRLALKLERECAGKDFRTLDELITLWYRMHGKTLRDHIRLRKSLYRISERLGNPIASDFTSKDFAHYREQRSIEVTTTTINREHAYLRAMFNELERLGVIEFENPLIKIRQFKEREKELRYLAHDEIARLLESCQTFSNQSLSFIVKICLATGARWGEAESLKPSQIKNNQITFLNTKSSKNRTVPINKTLYDELTALESISEERMFLNSLSAFRKAVAEAKIDLPKGQMTHVLRHTFASHYVMSGGNIVKLRDVLGHSEITTTMRYAHLAPEHLEETLTLNPLNQHQNTTDS

SEQ ID NO: 1687 - protein, 431 aa, Alteromonas macleodii
MKYHPITDTIELQALQRDILDSQEFKSVYPTLSEYIDSFEQQGIPAKNDLKQLLNFLVTGLSNAKGTQSRFRNEAERFTLFCWHERGKSVLDIKLEDIKLYIDWIWSPPKNLIADTTISSRFKYRSNSDIRVVNPEWRPFVHRTPKANRKIESLIAPGKASSIKHAYKLSQTSLRNSYASLNIFFKWLIDAELVMRNYLADAKKNCKYLIKGKIYQPPHTFDDEVWDIFIQCLTDAADENPKFEIHRFVVLSLKVLFLRISELSSRDYYTPLFNHFRPDPSNEGWVLHVVGKGKKERVVTVPDSYIENVLGRYRESMDLAPLPRIDEDTPILPSTKTGKPLKQDSVNNIVEEAFDLVISTLMKSGKKQQALDIAGASSHWLRHTGATQALDELNETMLAEELGHASVKTTVEIYVAPAHRDRIRKGSQRKL

SEQ ID NO: 1688 - protein, 317 aa, Candidatus Pelagibacter sp. RS40
MNELTTDLKLLHEATLNNLKNSKANNTLRAYKSDFKDFGAFCAKNGLNSLPTEPKIVSLYLTHLSKNSKISTLRRRLVSISMVHKMKGHYLDTKHPIIVENLMGIRRVKGSIQRGKKPLLINHLKLLIDTINEQKTEEIKKFRDKSLILIGFGGGFRRTELISIDHEDLEFVPEGLKITIKKSKTDQYGEGMIKGIPYFSTENYCPVKNLNKWLEISKIKSGPIFRRFSKGLSLTDKRLTDQSVVLLMKEYLNLAGIENTNFAGHSLRSGFATVAAESGADERSIMAMTGHKTTQMVRRYIREANIFKNNALNKVKF

SEQ ID NO: 1689 - protein, 317 aa, Pelagibacteraceae bacterium GOM-A3
MNEITTDLKSLHEATLNNLKSSKANNTLRAYKSDFKDFGAFCAKHGLNPLPTEPKIVSLYLTHLSKNTKISTLRRRLVSISMVHRLKGHYLDTKHPIIVENLMGIRRIKGSIQKGKKPLLINHLKLIINVINEQKTEEIKKLRDKSIILIGFGGGFRRTELISIDHEDLEFVSEGLKITIKRSKTDQFGEGMIKGLPYFDNEIYCPVTNLQKWLEISKIKSGPIFRRFSKGLSLTDKRLTDQSVVLLMKEYLKLAGIENKNFAGHSLRSGFATVAADSGADERSIMAMTGHKTTQMVRRYIREANIFKNNALNKIKV

SEQ ID NO: 1690 - protein, 427 aa, Serratia fonticola
MAPFLGPNAKGPKIEGPKMAKIAKKLTDTEIKNTKPAEKEINLFDGDGLMLRIAPLSKGGKKNWYFRYAVPVTKKRTKMSLGTYPHLTLAKARALRDEYLSLLANGIDPQIHNNDKANALKDATEHTLQAVARKWLDEKVKTSGISPDHAEDIWRSLERNIFPGLGNVPIKEIRPKLLKQHLDPIEQRGVLETLRRIISRLNEIFRWAATEELIEFNPADNLGHRFSKPKKQNMPALPPNELPRFMLAISNASIRLETRLLIEWQLLTWVRPGEAVRARWSDIDEDNRFWNIPGEFMKMKRPHKIPLSKEAMRILESIKPISGHREWVFPSIKAPLNHMHEQTANAAIIRMGFGGELVAHGMRSIARTAAEESGKFRTEVLESALAHTKNNEIIAAYNRSEYLAERTELMQWWGDYVQAQKYKAIAA

SEQ ID NO: 1691 - protein, 310 aa, Herminiimonas arsenitoxidans
MNNVDHYLHAATRENTRKSYQAAVRHFEVEWGGFLPATANSVARYLADHAELLSANTLRQRLAALGQWHIDQGFPDPTKAPIVRNVFRGIRASHPSQEKQAKPLLLAEVEQVATSLSAFAAQAQEKGDRSLSLRLKRNNALLLIGFWRGFRADELTRLAVESISVVPGEGMICYLPHTKGDRQYRGTPFKVPALAKLCPVSAYQDWQNSAQLTDGPVFRAIDRWGHVGERGMHVDSIGPLLRSILSENGVVSSELYSSHSLRRGFANWAISSGWDIKTLMSYVGWKDVQSAARYVDAADPFGNHLLSSAS

SEQ ID NO: 1692 - protein, 390 aa, Mesorhizobium sp.
MAPIVDLSRENRPEESKAPSHSTTAIASTSPPSPPADDLPDIVDIVMEMAQAPCEPQNAPPLPAHLEGLAERARDYVEAASSANTRRAYAADWKHFCAWARRQHLDVLPPDPQVVGLYITACASGKVTGDKKPNAVSTIERRLSSITWNFSQRGQPLDRKDRHIATVLAGIRNTHASPPRQKEAILTEDLIAMLETLDRGTLRGLRDRAMLLLGFAGGLRRSEIVGLDVARDQTQDGRGWIEVLDKGVLVALRGKTGWREVEIGRGSSDATCPVVAVQTWLKLARVGHGPLFRRVTGNGKAVAAERLNDQEVARLVKRTALAAGVRGDLSEGDRAEKFSGHSLRAGLASSAEVDERYVQKQLGHTSAEMTRRYQRRRDRFRVNLTRASGL

SEQ ID NO: 1693 - protein, 390 aa, Mesorhizobium sp. M7A.F.Ca.CA.001.13.1.1
MAPIVDLSRENRPEESKAPSHSTTAIASTSPPSPPADDLPDIVDIVMEMAQAPCEPQNAPPLPAHLEGLAERARDYVEAASSANTRRAYAADWKHFCAWARRQHLDVLPPDPQVVGLYITACASGKVTGDKKPNAVSTIERRLSSITWNFSQRGQPLDRKDRHIATVLAGIRTTHASPPRQKEAILTEDLIAMLETLDRGTLRGLRDRAMLLLGFAGGLRRSEIVGLDVARDQTQDGRGWIEVLDKGVLVALRGKTGWREVEIGRGSSDATCPVVAVQTWLKLARVGHGPLFRRVTGNGKAVAAERLNDQEVARLVKRTALAAGVRGDLSEGDRAEKFSGHSLRAGLASSAEVDERYVQKQLGHTSAEMTRRYQRRRDRFRVNLTRASGL

SEQ ID NO: 1694 - protein, 296 aa, Sphingobium sp.
MTPALSERWRQHLALDRRRSVHTVRAYVATAERLIAFLEQHRGEGVSPATLAHIDQAELRAFLASRRTDGIGNLSAARELSAVRGFLRFVGGDDARVPLLKGPRVKRGLPRPISPDEAVALAQDIAETAREGWIGARDWAVLLLLYGAGLRIGEAMGLHGDILPLGDTLRVTGKRGKTRIVPLLPQVRAAIDAYVDACPYPPARDQPLFRGARGGPLSPALIRRAVQGARGRLGLSDRTTPHALRHSFATHLLGRGADLRSLQELLGHASLSSTQVYTQVDAAHLLDIYRNAHPRA

SEQ ID NO: 1695 - protein, 327 aa, Pseudomonas putida
  MOD_RES (120)..(120): Any amino acid
MLISPELGSIFSQWGFFAVREEGSPMTDPADRYLRPVQRDSTQRRYQGVLRYFEQGWGACLPASGDTVVRYLVEHAESLSSSTLGLHLAALAQWHHSHGFDDPTKNAQVRQVLRSIRAQXPRLVKQAEPLPLIELERCVTGLQQRIASDHPVVRLRASRDQALILMGFWRAFRADELCRLRVEHNALCRGKQLEVFLGSSKTDREYRGQVVLLPALKRLCPVQAYEDWLAISELQEGPVFRPINQWGHISPLGLKPDGVTYVLREAFACSGLDGAAYTGHSLRRGFATWANNDSWTTKQLMDYVGWRDVKSAMRYIDTTAPFGDLRR

SEQ ID NO: 1696 - protein, 302 aa, Pseudomonas putida
  MOD_RES (95)..(95): Any amino acid
MTDPADRYLRPVQRDSTQRRYQGVLRYFEQGWGACLPASGDTVVRYLVEHAESLSSSTLGLHLAALAQWHHSHGFDDPTKNAQVRQVLRSIRAQXPRLVKQAEPLPLIELERCVTGLQQRIASDHPVVRLRASRDQALILMGFWRAFRADELCRLRVEHNALCRGKQLEVFLGSSKTDREYRGQVVLLPALKRLCPVQAYEDWLAISELQEGPVFRPINQWGHISPLGLKPDGVTYVLREAFACSGLDGAAYTGHSLRRGFATWANNDSWTTKQLMDYVGWRDVKSAMRYIDTTAPFGDLRR

SEQ ID NO: 1697 - protein, 483 aa, Noviherbaspirillum autotrophicum
MPKLQPKQLEAQRAGDNGKTLRDDGGLFGRVRAKADGTVSISFYYRYRFDGKLKDYACGTWPRESLSKIRTTRDAAKLLVKQHIDPSSHQKVAKQDAKDAVTARLAEIERQKSEALTFQDLFDTWLLDGVRRADGNAELKRSFNADVLPKLGKKQIKELTEHDLRGVLRAIVTRGANRTAVVMRNNLTQMFVWAEKRQPWRKLLVDGNPMDLIEIEKVVSTDYDMNNRRERLLAEEEIRELHDIFQRMQAAYDAAPKKRTAAQPVEKTTQCAIWIMLATLCRVGETSKARWEHINFDTGEWFIPQDDTKGKRSELTVFLSDFALDQFRQLYKLTGHSEWCFPAKNREGHVCEKSISKQVGDRQCRFKKGKDGNPRKPMKRRRHDDTLVLANGKNGAWTPHDMRRTGATMMQSLGIALDIIDRCQNHVLEGSKVRRHYLHHDYAPEKREAWRLLGEQLTLILSASTHNKAPQQSSQREAPSRSH

SEQ ID NO: 1698 - protein, 475 aa, Acinetobacter johnsonii
MSTKLKNGQSRYQSKAKVVTIKKFQLSTLRKAADRLNDAAFEKHGDAYLEFPVIIQGDGNPSEIFNLYLLKKLEQTIQYDFKTFASIAHQLVDFQRFLEDEQLDCLKFHKLKQLNAIFKYRTRLIEQANAGLISASSARGRINAVVNFYRFLVTEDLVDHQRYGLPFQDVYKYIAVDNEFGARRKMAIKSHDLAIHVPAKAQNSEAILDGGELSPLTVEEQAVVLKALQKSSLEYQLMFYLALFTGARLQTICTLRIKCLFNRESDNHGFIRLPVGAGTGVDTKFQKPMTLLIPHWLALDLKIYINSEQAQQRRQKSNYADSDENYVFLTKLGTPFYTSKAEQQELTDKIKASDSFGARLKLYEGEAVRSYLKGVLLPEIRLIDPQFQSFKFHDLRASFGMNLLESQLQHLPEGHSAMTAVEYVQARMGHRNISTTLQYLNYKSRLQWRNKIQHEYESSLMKYVMSSVNPVGDFS

SEQ ID NO: 1699 - protein, 378 aa, Klebsiella sp.
MTDKTKLVAISRTDDISALDALKLLRFRRYNTARSQLRVTSVWSAWCARHGLTPFPVTAVDVERYINGLNGSVKMATISHFIACLSSVNSSLGFPDFRNVLIKALVQVWRARENEKKIVTGQALPFLISDLNILRRSLHKSDDLRDIRDLAMIWVGFETLLRNVEIRRIKTGDLKWQDDTSCYLLDVMRTKTSLSSNLTFQLSPQCSQHVRRLIETVEYTDTETFGHRFLFQPVNIHTNRYFPSTSSKLSRGKSIDRMLVKAGFSEGLLTQLQNESKVSREDVGMLSSNSLNQAFARLWGIAGKVSDSNRQSGRYRTWTGHSVRVGGAIELFKAGYSLEKITEMGNWSDPKMVFRYIRGYLASEKAMVSFMRNHLDDI

SEQ ID NO: 1700 - protein, 378 aa, Klebsiella pneumoniae
MTDKTKLVAISRTDDISALDALKLLRFRRYNTARSQLRVTSVWSAWCARHGLTPFPVTAVDVERYINGLNGSVKMATISHFIACLSSVNSSLGFPDFRNVLIKALVQVWRTRENEKKIVTGQALPFLISDLNILRRSLHKSDDLRDIRDLAMIWVGFETLLRNVEIRRIKTGDLKWQNDTSCYLLDVMRTKTSLSSNLTFQLSPQCSQHVRRLIETVEYTDTETFGHRFLFQPVNIHTNRYFPSTSSKLSRGKSIDRMLVKAGFSEGLLTQLQNESKVSREDVGMLSSNSLNQAFARLWGIAGKVSDSNRQSGRYRTWTGHSVRVGGAIELFKAGYSLEKITEMGNWSDPKMVFRYIRGYLASEKAMVSFMRNHLDDI

SEQ ID NO: 1701 - protein, 378 aa, Unknown
  source: /note="Description of Unknown: Bacteria sequence"
MTDKTKLVAISRTDDISALDALKLLRFRRYNTARSQLRVTSVWSAWCARHGLTPFPVTAVDVERYINGLNGSVKMATISHFIACLSSVNSSLGFPDFRNVLIKALVQVWRARENEKKIVTGQALPFLISDLNILRRSLHKSDDLRDIRDLAMIWVGFETLLRNVEIRRIKTGDLKWQNDTSCYLLDVMRTKTSLSSNLTFQLSPQCSQHVRRLIETVEYTDTETFGHRFLFQPVNIHTNRYFPSTSSKLSRGKSIDRMLVKAGFSEGLLTQLQNESKVSREDVGMLSSNSLNQAFARLWGIAGKVSDSNRQSGRYRTWTGHSVRVGGAIELFKAGYSLEKITEMGNWSDPKMVFRYIRGYLASEKAMVSFMRNHLDDI

SEQ ID NO: 1702 - protein, 378 aa, Klebsiella pneumoniae
MTDKTKLVAISRTDDMSALDALKLLRFRRYNTARSQLRVTSVWSAWCARHGLTPFPVTAVDVERYINGLNGSVKMATISHFIACLSSVNSSLGFPDFRNVLIKALVQVWRARENEKKIVTGQALPFLISDLNILRRSLHKSDDLRDIRDLAMIWVGFETLLRNVEIRRIKTGDLKWQNDTSCYLLDVMRTKTSLSSNLTFQLSPQCSQHVRRLIETVEYTDTDTFGHRFLFQPVNIHTNRYFPSTSSKLSRGKSIDRMLVKAGFSEGLLTQLQNESKVSREDVGMLSSNSLNQAFARLWGIAGKVGDSNRQSGRYRTWTGHSVRVGGAIELFKAGYSLEKITEMGNWSDPKMVFRYIRGYLASEKAMVSFMRNHLDDI

SEQ ID NO: 1703 - protein, 378 aa, Klebsiella sp.
MTDKTKLVAISRTDDMSALDALKLLRFRRYNTARSQLRVTSVWSAWCARHGLTPFPVTAVDVERYINGLNGSVKMATISHFIACLSSVNSSLGFPDFRNVLIKALVQVWRARENEKKIVTGQALPFLISDLNILRRSLHKSDDLRDIRDLAMIWVGFETLLRNVEIRRIKTGDLKWQNDTSCYLLDVMRTKTSLSSNLTFQLSPQCSQHVRRLIETVEYTDTETFGHRFLFQPVNIHTNRYFPSTSSKLSRGKSIDRMLVKAGFSEGLLTQLQNESKISREDVGMLSSNSLNQAFARLWGIAGKVGDSNRQSGRYRTWTGHSVRVGGAIELFKAGYSLEKITEMGNWSDPKMVFRYIRGYLASEKAMVSFMRNHLDDI

SEQ ID NO: 1704 - protein, 378 aa, Unknown
  source: /note="Description of Unknown: Enterobacteriaceae sequence"
MTDKTKLVAISRTDDMSALDALKLLRFRRYNTARSQLRVTSVWSAWCARHGLTPFPVTAVDVERYINGLNGSVKMATISHFIACLSSVNSSLGFPDFRNVLIKALVQVWRARENEKKIVTGQALPFLISDLNILRRSLHKSDDLRDIRDLAMIWVGFETLLRNVEIRRIKTGDLKWQNDTSCYLLDVMRTKTSLSSNLTFQLSPQCSQHVRRLIETVEYTDTETFGHRFLFQPVNIHTNRYFPSTSSKLSRGKSIDRMLVKAGFSEGLLTQLQNESKVSREDVGMLSSNSLNQAFARLWGIAGKVGDSNRQSGRYRTWTGHSVRVGGAIELFKAGYSLEKITEMGNWSDPKMVFRYIRGYLASEKAMVSFMRNHLDDI

SEQ ID NO: 1705 - protein, 378 aa, Unknown
  source: /note="Description of Unknown: Enterobacteriaceae sequence"
MTDKTKLVAISRTDDMSALDALKLLRFRRYNTARSQLRVTSVWSAWCARHGLTPFPVTAVDVERYINGLNGSVKMATISHFIACLSSVNSSLGFPDFRNVLIKALVQVWRARENEKKIVTGQALPFLISDLNILRRSLHKSDDLRDIRDLAMIWVGFETLLRNVEIRRIKTGDLKWQNDTSCYLLDVMRTKTSLSSNLTFQLSPQCSQHVRRLIETVEYTDTETFGHRFLFQPVNIHTNRYFPSTSSKLSRGKSIDRMLVKAGFSEGLLTQLQNESKVSREDVGMLSSNSLNQAFARLWGIAGKVSDSNRQSGRYRTWTGHSVRVGGAIELFKAGYSLEKITEMGNWSDPKMVFRYIRGYLASEKAMVSFMRNHLDDI

SEQ ID NO: 1706 - protein, 378 aa, Klebsiella variicola
MTDKTKLVAISRTDDMSALDALKLLRFRRYNTARSQLRVTSVWSAWCARHGLTPFPVTAVDVERYINGLNGSVKMATISHFIACLSSVNSSLGFPDFRNVLIKALVQVWRARENEKKIVTGQALPFLISDLNILRRSLHKSDDLRDIRDLAMIWVGFETLLRNVEIRRIKTGDLKWQNDTSCYLLDVMRTKTSLSSNLTFQLSPQCSQHIRRLIETVEYTDTETFGHRFLFQPVNIHTNRYFPSTSSKLSRGKSIDRMLVKAGFSEGLLTQLQNESKVSREDVGMLSSNSLNQAFARLWGIAGKVGDSNRQSGRYRTWTGHSVRVGGAIELFKAGYSLEKITEMGNWSDPKMVFRYIRGYLASEKAMVSFMRNHLDDL

SEQ ID NO: 1707 - protein, 378 aa, Unknown
  source: /note="Description of Unknown: Enterobacteriaceae sequence"
MTDKTKLVAISRTDDMSALDALKLLRFRRYNTARSQLRVTSVWSAWCARHGLTPFPVTAVDVERYINGLNGSVKMATISHFIACLSSVNSSLGFPDFRNVLIKALVQVWRARENEKKIVTGQALPFLISDLNILRRSLHKSDDLRDIRDLAMIWVGFETLLRNVEIRRIKTGDLKWQNDTSCYLLDVMRTKTSLSSNLTFQLSPQCSQHVRRLIETVEYTDTETFGHRFLFQPVNIHTNRYFPSTSSKLSRGKSIDRMLVKAGFSQGLLTQLQNESKVSREDVGMLSSNSLNQAFARLWGIAGKVGDSNRQSGRYRTWTGHSVRVGGAIELFKAGYSLEKITEMGNWSDPKMVFRYIRGYLASEKAMVSFMRNHLDDI

SEQ ID NO: 1708 - protein, 378 aa, Klebsiella sp.
MTDKTKLVAISRTDDMSALDALKLLRFRRYNTARSQLRVTSVWSAWCARHGLTPFPVTAVDVERYINGLNGSVKMATISHFIACLSSVNSSLGFPDFRNVLIKALVQVWRARENEKKIVTGQALPFLISDLNILRRSLHKSDDLRDIRDLAMIWVGFETLLRNVEIRRIKTGDLKWQNDTSCYLLDVMRTKTSLSSNLTFQLSPQCSQHVRRLIETVEYTDTETFGHRFLFQPVNIHTNRYFPSTSSKLSRGKSIDRMLVKAGFSEGLLTQLQNESKVSREDVGMLSSNSLKQAFARLWGIAGKVGDSNRQSGRYRTWTGHSVRVGGAIELFKAGYSLEKITEMGNWSDPKMVFRYIRGYLASEKAMVSFMRNHLDDI

SEQ ID NO: 1709 - protein, 378 aa, Unknown
  source: /note="Description of Unknown: Enterobacteriaceae sequence"
MTDKTKLVAISRTDDMSALDALKLLRFRRYNTARSQLRVTSVWSAWCARHGLTPFPVTAVDVERYINGLNGSVKMATISHFIACLSSVNSSLGFPDFRNVLIKALVQVWRARENEKKIVTGQALPFLISDLNILRRSLHKSDDLRDIRDLAMIWVGFETLLRNVEIRRIKTGDLKWQNDTSCYLLDVMRTKTSLSSNLTFQLSPQCSQHVRRLIETVEYTDTETFGHRFLFQPVNIHTNRYFPSTSSKLSRGKSIDRMLVKAGFSEGLLTQLQNESKVSREDVGMLSSNSLNQAFARLWGIAGKVGDSNRQSGRYRTWTGHSVRVGGAIELFKAGYSLEKITEMGNWSDPKMVFRYIRGYLASEKAMVSFMRNHLDDL

SEQ ID NO: 1710 - protein, 378 aa, Unknown
  source: /note="Description of Unknown: Enterobacteriaceae sequence"
MTDKTKLVAIARTDDMSALEALKLLRFRRYNTARSQLRVTSVWSAWCARHGLTPFPVTAVDVERYINGLNGSVKMATISHFIACLSSVNSSLGFPDFRNVLIKALVQVWRARENEKKIVTGQALPFLISDLNILRRSLHKSDDLRDIRDLAMIWVGFETLLRNVEIRRIKTGDLKWQNDTSCYLLDVMRTKTSLSSNLTFQLSPQCSQHVRRLIETVEYTDTETFGHRFLFQPVNIHTNRYFPSTSSKLSRGKSIDRMLVKAGFSEGLLTQLQNESKVSREDVGMLSSNSLNQAFARLWGIAGKVSDSNRQSGRYRTWTGHSVRVGGAIELFKAGYSLEKITEMGNWSDPKMVFRYIRGYLASEKAMVSFMRNHLDDI

SEQ ID NO: 1711 - protein, 378 aa, Klebsiella pneumoniae
MTDKTKLVAISRTDDMSALDALKLLRFRRYNTARSQLRVTSVWSAWCARHGLTPFPVTAVDVERYINGLNGSVKMATISHFIACLSSVNSSLGFPDFRNVLIKALVQVWRARENEKKIVTGQALPFLISDLNILRRSLHKSDDLRDKRDLAMIWVGFETLLRNVEIRRIKTGDLKWQNDTSCYLLDVMRTKTSLSSNLTFQLSPQCSQHVRRLIETVEYTDTETFGHRFLFQPVNIHTNRYFPSTSSKLSRGKSIDRMLVKAGFSEGLLTQLQNESKVSREDVGMLSSNSLNQAFARLWGIAGKVGDSNRQSGRYRTWTGHSVRVGGAIELFKAGYSLEKITEMGNWSDPKMVFRYIRGYLASEKAMVSFMRNHLDDI

SEQ ID NO: 1712 - protein, 378 aa, Klebsiella pneumoniae
MTDKTKLVAISRTDDMSALDALKLLRFRRYNTARSQLRVTSVWSAWCARHGLTPFPVTAVDVERYINGLNGSVKMATISHFIACLSSVNSSLGFPDFRNVLIKALVQVWRARENEKKTVTGQALPFLISDLNILRRSLHKSNDLRDIRDLAMIWVGFETLLRNVEIRRIKTGDLKWQNDTSCYLLDVMRTKTSLSSNLTFQLSPQCSQHVRRLIETVEYIDTETFGHRFLFQPVNIHTNRYFPSTSSKLSRGKSIDRMLVKTGFSERLLTQLQNESKVSREDVGMLSSNSLNQAFARLWGIAGKVSDSNRQSGRYRTWTGHSVRVGGAIELFKAGYSLEKITEMGNWSDPKMVFRYIRGYLASEKAMVSFMRNHLDDI

SEQ ID NO: 1713 - protein, 378 aa, Klebsiella sp.
MTDKTKLVAISRTDDMSALDALKLLRFRRYNTARSQLRVTSVWSAWCARHGLTPFPVTAVDVERYINGLNGSVKMATISHFIACLSSVNSSLGFQDFRNVLIKALVQVWRARENEKKIVTGQALPFLISDLNILRRSLHKSDDLRDIRDLAMIWVGFETLLRNVEIRRIKTGDLKWQNDTSCYLLDVMRTKTSLSSNLTFQLSPQCSQHVRRLIETVEYTDTETFGHRFLFQPVNIHTNRYFPSTSSKLSRGKSIDRMLVKAGFSEGLLTQLKNESKVSREDVGMLSSNSLNQAFARLWGIAGKVGDSNRQSGRYRTWTGHSVRVGGAIELFKAGYSLEKITEMGNWSDPKMVFRYIRGYLASEKAMVSFMRNHLDDI

SEQ ID NO: 1714 - protein, 378 aa, Klebsiella pneumoniae
MTDKTKLVAISRTDDMSALDALKLLRFRRYHTARSQLRVTSVWSAWCARHGLTPFPVTAVDVERYINGLNGSVKMATISHFIACLSSVNSSLGFPDFRNVLIKALVQVWRARENEKKIVTGQALPFLISDLNILRRSLHKSDDLRDIRDLAMIWVGFETLLRNVEIRRIKTGDLKWQNDTSCYLLDVMRTKTSLSSNLTFQLSPQCSQHVRRLIETVEYTDTETFGHRFLFQPVNIHTNRYFPSTSSKLSRGKSIDRMLVKAGFSEGLLTQLQNESKVSREDVGMLSSNSLNQAFARLWGIAGKVGDSNRQSGRYRTWTGHSVRVGGAIELFKAGYSLEKITEMGNWSDPKMVFRYIRGYLASEKAMVSFMRNHLDDI

SEQ ID NO: 1715 - protein, 378 aa, Klebsiella pneumoniae
  MOD_RES (142)..(142): Any amino acid
MTDKTKLVAISRTDDMSALDALKLLRFRRYNTARSQLRVTSVWSAWCARHGLTPFPVTAVDVERYINGLNGSVKMATISHFIACLSSVNSSLGFPDFRNVLIKALVQVWRARENEKKIVTGQALPFLISDLNILRRSLHKSXDLRDIRDLAMIWVGFETLLRNVEIRRIKTGDLKWQNDTSCYLLDVMRTKTSLSSNLTFQLSPQCSQHVRRLIETVEYTDTETFGHRFLFQPVNIHTNRYFPSTSSKLSRGKSIDRMLVKAGFSEGLLTQLQNESKVSREDVGMLSSNSLNQAFARLWGIAGKVGDSNRQSGRYRTWTGHSVRVGGAIELFKAGYSLEKITEMGNWSDPKMVFRYIRGYLASEKAMVSFMRNHLDDI

SEQ ID NO: 1716 - protein, 378 aa, Klebsiella pneumoniae
MTDKTKLVAISRTDDMSALDALKLLRFRRYNTARSQLRVTSVWSAWCARHGLTPFPVTAVDVERYINGLNGSVKMATISHFIACLSSVNSSLGFQDFRNVLIKALVQVWRARGNEKKNVTGQGLPFLISDLNILRRSLHKSDDLRDIRDLAMIWVGFETLLRNVEIRRIKTGDLKWQNDTSCYLLDVMRTKTSLSSNLTFQLSPQCSQHVRRLIETVEYTDTETFGHRFLFQPVNIHTNRYFPSTSSKLSRGKSIDRMLVKAGFSEGLLTQLKNESKVSREDVGMLSSNSLNQAFARLWGIAGKVGDSNRQSGRYRTWTGHSVRVGGAIELFKAGYSLEKITEMGNWSDPKMVFRYIRGYLASEKAMVSFMRNHLDDI

SEQ ID NO: 1717 - protein, 378 aa, Klebsiella pneumoniae
MTDKTKLVAIARTDDMSALEALKLLRFRRYNTARSQLRVTSVWSAWCARHGLTPFPVTAVDVERYINGLNGSVKMATISHFIACLSSVNSSLGFPDFRNVLIKALVQVWRARENEKKIVTGQALPFLISDLNILRRSLHKSDDLRDIQDLAMIWVGFETLLRNVEIRRIKTGDLKWQNDTSCYLLDVMRTKTSLSSNLTFQLSPQCSQHVRRLIETVEYTDTETFGHRFLFQPVNIHTNRYFPSTSSKLSRGKSIDRMLVKAGFSEGLLTQLQNESKVSREDVGMLSSNSLNQAFARLWGIAGKVSDSNRQSGRYRTWTGHSVRVGGAIELFKAGYSLEKITEMGNWSDPKMVFRYIRGYLASEKAMVSFMRNHLDDI

SEQ ID NO: 1718 - protein, 371 aa, Shewanella baltica
MSKMIRTNSNAQNNANISNERATGSDHHHNNRAEQPRFFEESFLPQSVRSDYLSAAEETEYEISVNTRRVYNTSFSVFSRYCAEHQLQALPADPRSVISFIGHQKELIQESTGVQLSKQTLTTRLAAIRYHHIQAGFHSPTEHPLVIRVMRGLSRNQSRHVSDYDQQPIMYDEVEMLIQAIDEQVQPLTRARDKAIIQLGLQGGFRRSELADIKVQYVSFLRNKLKVRLPYSKSNQQGQREWKDLPDHEPFAALDAVKNWLSLANIEDGHLFRSLSRDGKNLRPYQMKDRHSGSSSLLNKNSGFLTGDDIYRIIKKYCTKAGLPAKFYGAHSLRSGCVTQLHENNKDHLYIMARTGHTDPRSLRHYLKPKD

SEQ ID NO: 1719 - protein, 311 aa, Methylobacterium sp. B34
MTQLPAVSLADTYAREALSKATARAYRADWNHFLDWCESREVSGLPATVQTICDYLASMAETHARATIERRVVTIAQAHKIKGLPWVSGQPRIRATLRGMFRLHGRPQVKSAAIEVDELRAILSSMPASTVGLRDRAIFLLTFAGAMRRSEVARLRRQDVVIGKDGLRILVSRSKSDQVGEGHVLAIPRGANMATCPVEALTRWLRAAPADDAIFRSIRADGTVLDHPLHPNSIGEIVKRCAARAGVSATSPNERISAHGLRAGCITSLYRKGVSDEAIMGHSRHRDLKTMRGYVRRGKLMTESPAKELGL

SEQ ID NO: 1720 - protein, 362 aa, Mycobacterium virus Angelica
MASLRTSSRKDGSTYTSVLYRLNGKQTSTSFDDPVQAVEFKRMVEQLGAAKALEVIETTDAAARHYTLSEWLRHYLDHKTGVEKSTIYDYEKVVAKDIDPALGPIPLAALTGDDIAKWVQALADRGLKGKTISNKHGFLSSALNAAVRAGRIPGNPAAGARLPRTEKAEMVFLTREQYAKLHDNITLPWQPLVEFLVASGARWGEVVALRPSDVNRDASTVRISRASKRTYEKGSYALGAPKTLKSRRTINVDASVLGKLDYSGEYLFTNTVGNPVRHNNFHANVWQPALKRAGLDVKPRVHDLRHTCASWLIAAGVPLPAIRDHLGHESIKITVDTYGHLDRSSGQIVAAAIAAQLDPARG

SEQ ID NO: 1721 - protein, 313 aa, Thiobaca trueperi
MTSVDRYLEAATRTNTRRGYRSAIRHFEEVWGGFLPATADAVARYLADHAESLALNTLRLRLAALSQWHLEQGFPDPTKASVVRKVLKGIGELHPAREQQARPLQIEELARLDDWLAARIQESANHDEQAARRRATRDRALILLGFWRAFRGDELNRLRVEHIQVIPGEGMTLYLPRTKTDHSARGSEFKVPALSRLCPVDAYLDWISLTQLTEGPVFRRINRWGAVGDEALHPNSLIPLLRKRFVEAGLAMPEHYSGHSLRRGFASWANANHWDVKSLMDYVGWKDMKSALRYIERPDAFGRERIERALAQT

SEQ ID NO: 1722 - protein, 450 aa, Unknown
  source: /note="Description of Unknown: Citrobacter freundii complex"
MNIKRFQFNSGESYSILLDDDLLPMYYPNLFVTLYHRNRSDTANTCYKEFEHIKLFYEIMDILDIDIENRCKRGVFLERNEVEGITGLAKYHSAILKEVNFTFLNNSLKKKKPSPGKIEGARFSPVINKENLVSSKTCYNRLTTFANYIGWLENMLFHSTQADTKHLFIVLRPKRKERINIIDNHAVKVVDLLDKNGVKIPLENSDYNDDYRSLSENQLAQIFEVVKVENNRNPWQRSDVRFRNQLLIHLLSSTGMRRGEVIRIKITDLGRSTTTGRYYLLVRVGEDMEDKRINKPSAKTSGRRVPLHQNLYHMIEEYIIFHRSKITNVEKTPYLLVAHSSGRNQKGDNGLSLVSVNKICLQISVVVGFTVHPHMFRHTWNDRFSKHVENLIREGKTTEAKAESDRRKLMGWSSESEMGARYARKYEEERAIKTGLKLQDKSYNQEDDSQ

SEQ ID NO: 1723 - protein, 406 aa, Enterococcus sp.
MPTKLSNGKYKTNLRYPKKFREITGITSEKYQKVFPTRQLAIKAENAMKRKIETVLREENANSLELKGKIKFKEFYESKWLPRYELGQTTRSKRAPSYVTISNTKDIFRLHILPMFGEYAMNYLNSNTEIISDELTKKSKEYANIKIIKGYVRSMFDIAEILNYIEFNRTTKIIQCITVPKKIALEERRIREGNQALSSEELIAWIEAVNTDLNNHLLTLHDYTLFMLTLYLGDRKSETYALQWKYIDFEKQTVRLKHALDKYQKKKFTKGRKDTVIQVPEIVMALLSKWKSVQAEQLLRLKINQTPDQYLFTYTKPSGEVNCPVHADYLNYRINSIKRRHPELAHLSPHKLRHTYATIARQGGANMNQISNALTHSDISTTKIYVNTPDVVDKTVFEAFQKGLKN

SEQ ID NO: 1724 - protein, 321 aa, Pseudomonas aeruginosa
MSDVGRYMAAGRRKNTVRSYESGLRHYEVEWKGLLPATVDNVCQYLATYAAELSVPTLKHRLAALSKWHKENRFTDPTKDSRVGQVLRGIKAVHPHTPQQAAALGIADLARVVQVLECAAAEANESGDRKTLLQQKRDLAFLLIGFWRGFRGNELCNLQVQNVHAERGIGLEIVVHGSKGDRANDGVTFSTPALPKLCPVGAYLDWIEAAELKEGPVFRSISRWGVVGESALSLTNVSKLLREILERGGLDASKYSSHSLRHGFAHWAANHGWDLAETMDYVGWSDPKSALRYMPKKTPFERMANSAYSPPAIEHQSKRLK

SEQ ID NO: 1725 - protein, 349 aa, Burkholderia pseudomallei
MAALTKTPSGTWKATIRRVGWPTAAKTFRTKRDAEDWARRTEDEMVRGVFIQRAPSEKTTVADALDRYEREIVPTKKASTQRREGARIRELKANFGKYSLAAVTPDLVSRYRDDRLARGKANNTVRLELALLGHLFNVAIKEWHIGLIFNPVANIRKPSPGEGRNRRLSESEQAKLLATVDQHSNPMLGWIVRLAIETGMRQSEILGLRRGQVDLERRVVRLTDTKNNAARTVPLTKLAALVLQNALGNPVRPIDTDLVFFGEPGRDGKRRAYQFTKVWNGLKKRTGLIDFRFHDLRHEAVSRLVEAGLTDQEVASISGHKSMQMLRRYTHLRAEDLVSKLDAFASSRR

SEQ ID NO: 1726 - protein, 342 aa, Aeromonas veronii
MTYPTLSNPAHQSLQTVFDAQLNSRARRFLRSAKADSTLNAYQADTRIFVFWCQLHGLDPLQTTHHDIMNFLADQADGVLADWVWLDKEEGKGELRNGEPRKPATLVRRLAGIRYAFKQKGIHPMPTEHPEIKEMMRGIVRLGDNRKRKTGALTLQPLTQVLDGIDTNDLAGLRDHTLLLLMFSGALRRSEAARIEVSDLDFVGQGIRLRLKPSKHQLHETEIALIPGKHYCPVSALQKWLHKSRISEGPLFRRMNRWGQLMAEPLGPQGINLMIKRRTGQTIDDLYVSGHSLRRGFITSAVTAGKPMNKIIEVTRHKDMRTLQEYFDDAHKFSDHALDGLL

SEQ ID NO: 1727 - protein, 342 aa, Aeromonas hydrophila
MNYPHIQAQTQQALQSVFDPQLNSRARRFLRSAKADSTLNAYQADTRIFVFWCQLHGLDPLQTTHHDIMNFLADQADGILADWVWLDKEEGKGELRNGEPRKPATLVRRLAGIRYAFKQKGIHPMPTEHAEIKEMMRGIVRLGDNRKRKTGALTLKPLACVLDQIDTGNLAGLRDYTLLLLMFSGALRRSEAAKIEVDDLDFVGQGIRLRLKPSKHQLHETEIALVPGKQYCPVSALARWLKQSRISEGALFRRMNRWGQLMPEPLGPQGINLMIKRRTGQAIDDLQVSGHSLRRGFITSAVTAGKPMNKIIEVTRHKDIRTLQEYFDDAHKFSDHALDGLL

SEQ ID NO: 1728 - protein, 384 aa, Vibrio crassostreae
MSHSNLPTRKQSQVTLSHFQSTEKTLQQWEEQKEKLSRFKLNFPDLTDSFDPDWTSLPPVLTHLREFEEHRGGLSTHTLRMLAFVIRKWDVYCKSKEAYSFPIHAPVLLIWFKELKLSQNIKINTLKQYRAQLSLFHKIMNTDDITKLPVIATFFKSLPKDEMEITGSQVIELQAKPFRKHHLTHLMEVWGNKKRAVPFRDLAVLTLSYGTLLREGEVGKIRKKHIKFLENGDLNIERVTSKTTISPEPKRLTGRFSSIVKCYLDTYCTCLDDEDFVFCWLTVKGSRPAGYRQTPMSGMTIDRIYQRAHEVLLESGDIVISGDGHRDVWSGHSSRVGALQDGYHAGLSLTQLIQLGDWKSNEMVLRYLRGLDNDMSPNVLLQKK

SEQ ID NO: 1729 - protein, 368 aa, Belliella pelovolcani
MKKLDLKNDCIGKNPIIRIEFPYDFELKELVKQFPGCNWDIKKKVWWVSYADNRLTELITFFKGKVWLDYSQLKKVEIPKAQPVLPPLIASLEIEINKFEDWMRNKRYSESTIKTYKDAVIIFLRFLENKAIVEIENEDLEKFNKEYILARGYSSSYQNQVVNGIKLFFQNRRGIKFNPEIVYRPKREKLLPNVLSKEEVKSILDSHQNLKHRAMLCLIYSCGLRRGELLNLKIMDIDSKRNILIIRQTKGKKDRVVPLSPKIIELLREYFKAYKPTIYLFEGHKSQGKYSEKSLESVLKQALVKSGIKKPVTLHWLRHSYATHLLERGTDLRHIQELLGHNSSKTTEIYTHVSIRSLQKVWSPFDDL

SEQ ID NO: 1730 - protein, 362 aa, Luteibacter yeojuensis
MKDISTIPSLAQPAASLALPIHLAQQAADAVRELLAEAAADNTTRSYASALRYWAGWHAARYGVDMTLPVPEATVLQFVVDHVVRRSSDGELVWELPPSVDQALVAAGLKAKRGPWTLATVRHRVAVLSTAHRLKHVTNPCEQPAIRTVLSRAARAAVKRGERPRKKTAITIAELEAMLATCDDSIEGLRDRALLCFGFASGGRRRSEVAAADLRDLRRIGSQGFIYRLEHSKTQQAGVTPTSTPDKPVLDRAARALEAWLAAAGIIEGAIFRRLWKQRVGPALSPAAVGEIVQRRARLAGLEGDFGGHSLRSGFVTEASRQGVALPAIMQLTEHRSVSSVIGYFQMGGATENPAARLLEDG

SEQ ID NO: 1731 - protein, 333 aa, Luteibacter yeojuensis
MREPRAALATSVDQVLTRLASWSTDFAAGSASATVKAVRSDWAQYLVWCDTSGNSPLPASVLQLEAFLVDAIDRGRKRATVDRYLYTVGLVHAAAGLPSPSKDPDWSVKWKKLTRRLKTTGGHMRKQAAELDMGGVSAILATLGDSPRDLRDAALLSLASDTLCRESELVAIEVAHLHLNRRRNTWSLHVPFSKTNQDGESPDFRFVSQETIVRVRAWQATSGITEGALFRPVGGRPKLAGDASPALLPQEVARIFRRRAKAAGLEGAAAISGHSARIGSANDLAENGATSTQIQQAGGWKTERMVTHYTRKSLAGRGAMQDLRRTDPAKTSD

SEQ ID NO: 1732 - protein, 319 aa, Hymenobacter psychrotolerans
MSTVPVVPPSPASTSLAHLAEQTARYVEAGLQGAPNTARAYAGDWRRFTAWCTEHGQVALPASVDTLAGFVTHLAEAGKKVATIQRHCAAISKAHALRDLASPTDDKKFKVLLEGISRVKGTRQKQAPAFSLANFKRTVKHIDASTPGGLRDRVILLLGFTGAFRRSELSALDLEDLTFSDDGLTIDLKRSKTNQLGEAEEKAIFYSPDPSLCPIRTLQAWMRMLGRTAGPVLVSLRKGGRLTERRLTDVHLNKIVQRHLGPKFTAHSLRASFVTVAKLNGADDSEVMNQTKHKTSSMIRRYTRLDNVRQHNAAQKLGL

SEQ ID NO: 1733 - protein, 319 aa, Hymenobacter rigui
MSTVPVVPPSPTSTGLAHLAEQTARYVEAGLQGAPNTARAYAGDWRRFSAWCTEHGQVALPASVDTLAGFVTHLAEAEKKVATIQRHCAAISKAHALRDLASPTDDKKFKVLLEGISRLKGTRQKQAPAFSLASFKRTVKHIDASTPAGLRDRVILLLGFTGAFRRSELSALDLEDLTFSDEGLTIDLKRSKTNQLGEAEEKAIFYSPDPSLCPIRTLQTWLRMLGRTTGPVLVSLRKGGRLTERRLTDVHLNKIVQRHLGPKFTAHSLRASFVTVAKLNGADDSEVMNQTKHKTSSMIRRYTRLDNVRQHNAAQKLGL

SEQ ID NO: 1734 - protein, 319 aa, Hymenobacter sp. IS2118
MSSVPVAPASPSSVGLAHLTEHTTRYVEAGLQGAPNTARAYAGDWRRFTTWCTAHGQVALPASVETLAGFVTHLAEAGKKVSTIQRSCAAISKAHALRDLASPTDDKKFKVLMDGISRLKGVRQKQAPAFSLASFKRTIKHIDATTPAGLRDRVILLLGFTGAFRRSELSALDLDDLTFSEDGLTINLKRSKTNQLGEAEEKAIFYSPDPTLCTIRTLQAWLRLLERTSGPILVSFRKGGRLTDRRLTDVHLNKIVQRHLGPKFTAHSLRASFVTVAKLNGADDSEVMNQTKHKTSEMIRRYTRLDNVRQHNAAQKLGL

SEQ ID NO: 1735 - protein, 304 aa, Hymenobacter sp. NL
MAHLTEHTTKYVEAGLQGAPNTARAYAGDWRRFTEWCTAHAQVALPASVDTLAGFVTHLAEAGKKVSTIQRSCAAISKAHALRDLASPTDDKKFKVLMDGISRLKGVRQKQAPAFSLASFKRTLKHLDATTPAGLRDKVILLLGFTGAFRRSELSALDMDDLSFSEDGLTINLKRSKTNQLGGAEEKAIFYSPDPALCPIRTLQAWLRLLERTSGPILVSFRKGGRLTDRRLTDVHLNKIVQRHLGPKFTAHSLRASFVTVAKLNGADDSEVMNQTKHKTSEMIRRYTRLDNVRQHNAAQKLGL

SEQ ID NO: 1736 - protein, 304 aa, Hymenobacter perfusus
MAHLTEHTTRYVEAGLQGAPNTARAYAGDWRRFTEWCTTHGQVALPASVETLAGFVTHLAETGKKVSTIQRSCAAISKAHALRDLASPTDDKKFKVLMEGISRLKGVRQKQAPAFSLASFKRTLKHLDASTPAGLRDKVILLLGFTGAFRRSELSALDLDDLTFSEEGLTINLKRSKTNQLGQAEEKAIFYSPDPALCPIRTLQAWLRLLERTSGPILVSFRKGSRLTDRRLTDVHLNKIVQRHLGPKFTAHSLRASFVTVAKLNGADDSEVMNQTKHKTSEMIRRYTRLDNVRQHNAAQKLGL

SEQ ID NO: 1737 - protein, 349 aa, Legionella waltersii
MRKALMEHALNLLNDKNDKNRKFGVDKVFHPLDVHFDTNSLSAWLSFYFQVHVKGAPEKTVQAKQKDLSKFLNFFQVEVGHDQVDNWTPAVSKQFQRSLCNTISEKTGKAYKATSINRTMATIRHAGRWLYQQRPLIAGDPLSGVKDLQTDAPEWNGLNSKQLMRLKAACEQRAKICTRKNQNALLETAVFYVLLGTGLRESELVSLNVHQYHSKGLHSVVRHKSKRVTTKIPLPQESREHLEHYLKSRVSEPDEPLFINRAGNRINTRNIFRICQRVLKQVLALLPENERFEFTPHKLRHTFLKKVTDKHGVHFAQELSGNVSIKEIFRYAKPSQDEMQETIEELFES

SEQ ID NO: 1738 - protein, 230 aa, Actinomyces sp. oral taxon 181
MVTFWLAGAGKSTLKLVVSSWGYEYPQMSGVRASDDPDSPMPGKENVPQAHKREAKARHARIIQLTELQLATGLRASEARQITWADVTQDDHGVVWVTVRPEISKTKVGRTIPVLVPEVGKRLLARKGKDEELVIPQPNSGKPWDKAGVHKAVRDYYEGVAGTSEDLAFLKKIRSHAWRGALNTITAPHLRPDIRAAYFGHTEKVNARAYTDHVNVRPMMKAVEALTQRE

SEQ ID NO: 1739 - protein, 363 aa, Dankookia rubra
MATDGQDTEAGPGAGGANPPAQGRGSSTPPAPAAVPAVSGEPSEGTAAALPAAGREALDEALRYARAALSDNTRLAYAVDWQDFAAWCTAAGLAPLPAAAETVAAYLAALARTHAIATLRRRLVSIAKAHRVAGHTGFWAAHPVISETLRGITRTRGRPQRRAAALTTPDIRRLVATCGPDLAGLRDRALLLLGYAAALRRAELIAVEVEHLKFDAQGLRLHIPRSKGDQAGEGEELGIPRGQRRDTCPVRAIEAWMVASEAQYGPLFRKVNRWGGLEPGRLHPSSVRQILLRRAEQAGIAGTALEPISPHGLRAGFVTQAYKAGLRDEEIMQHSRHRDLRTMRRYVRRAKLLEDSPAKRLDL

SEQ ID NO: 1740 - protein, 400 aa, Unknown
  source: /note="Description of Unknown: Sphingomonadales sequence"
MSDISPPSALPGSALAALETDLALALRAPNVAVDRELLAAYVEAAAPNSIRALRQDVEAFDLWCRRSDARAFPATPGMVADWLKHRASEGAAPASLVRYKASIAKAHRLLDLDDPTKHEICRLAIAAHRRNVGSRQKQARPLRFRGAVKDPVQATPRGIHIRAILGACDNTPTGLRNRALLSVAYDTGLRASELVAVAAEDIVEALDPDARLLRIGRHKGDQEGEGSTAYLSPRSVQALQAWLHAADISEGPVFRRVIVRRYADRPARRRIDPNTISGRAIWDPRKFAAKAAVAARTEYNVGEKALHPGSVTPIVRGMIASAIDAGAFGDLDKEQARKLVAGFSAHSTRVGLNQDLFAIGETLAGIMDALRWKSPKMPLAYNRNLAAEAGAAGRLLSKLD

SEQ ID NO: 1741 - protein, 345 aa, Staphylococcus phage 2638A
MKTRCYDGKKWQYEFKHEGKRYRKKGFRTKREANSAGLDKLNELRQGFNFENNLTFEDYFKNWIETYKENIVSENTFRHYRFTLKHIQRHKIGKVEISKINKQMYQKFINDFSENRAKETIRKTNGAIKSALEDAVYDGLIAKNPTYKITFKAGKTTKSEEEKYISLEEYKALKEYLKDKSSKSALALYIMICTGCRVSGVRSMKLEYINEFRSELYIDEHKTDSSPRYVAVGKNDLRHIINVIKNSTISYDGYIFKDSGKLISINAINKTLKKACESLGINYITSHALRHTHCSYLLAKDISIYYISKRLGHKNISITTSIYSHLLEEKFSEEEQKTKNILDAM

SEQ ID NO: 1742 - protein, 325 aa, Spirosoma luteum
METGESLPAVYSQITTDGQRLPGLNEQQQKAREFYESGLYGAPNSKKAYQSDVKQYLAWYHHKGYEALPSTSQALAEYMTELSTDKGYFTLQRRLASIAKYHRIHNLPSPTIHEQFKLFMKGVRREKTIRQKQAMAFTLDEFRQAVDSQPLTPTGLRNRLILLLGFTGAFRRQELVDINVENLECRSDGILITINHSKTNQDGVEEAKFVAKAKQEAYCPLRTLQQWLTLIGRAEGPLFVRIRKGERPTLDRLSDDYVNLLTKAAFGQYYSAHSMRASFVTISKDAGVDNRKIQNQTKHKTTQMIDRYDRRRDVIYQNASTELDL

SEQ ID NO: 1743 - protein, 373 aa, Rhizobium leguminosarum
MQNPPANMPEIADDHRDGDLPDSVDLVTETGASASPASARVEALVATATAYANAASSENTRSAYAKDFSHFTAWCRREGFEPLPPSSQVIGLYIGACASGSVVDTAAGKPKRTAPALSVATIERRLSGLAWNFTQRGMPMDRSDRHIATVLAGIRRKHGTPPRQKEAVLGEDIRAMINTLGHDLRGLRDRAILLLGFAGGLRRSEIVGLDIARDDKSDGHGWIEIFPDQGVLVTLRGKTGWRQVEVGRGASSETCPVAALESWIRFGRIARGPLFRRIFKDNKTVDVERLSDKHVARLVKQTALAAGVRSDLPEGERALLFSGHSLRAGLASSADIEERYVQKQLGHASAEMTRKYQRRRDRFRTNLTKASGL

SEQ ID NO: 1744 - protein, 366 aa, Rhizobium leguminosarum bv. viciae
MPEIADDHRDGDLPDSVDLVTETGASASPASARVEALVATATAYANAASSENTRSAYAKDFSHFTAWCRREGFEPLPPSSQVIGLYIGACASGSVVDTAAGKPKRTAPALSVATIERRLSGLAWNFTQRGMPMDRSDRHIATVLAGIRRKHGTPPRQKEAVLGEDIRAMINTLGHDLRGLRDRAILLLGFAGGLRRSEIVGLDIARDDKSDGHGWIEIFPDQGVLVTLRGKTGWRQVEVGRGASSETCPVAALESWIRFGRIARGPLFRRIFKDNKTVDVERLSDKHVARLVKQTALAAGVRSDLPEGERALLFSGHSLRAGLASSADIEERYVQKQLGHASAEMTRKYQRRRDRFRTNLTKASGL

SEQ ID NO: 1745 - protein, 369 aa, Octadecabacter arcticus
MLSHLVPLSRTGVKYPNVRQQGRSSIDPLEEKKTRRIEPTVADLASDWLDVHASGLKSEQAIRSLIGGDLVKAIGRMKVTDVRRRDVIEAVEAKATTAPRQAALMLSYARMLLDYATDRDIVRANPVAGLKPASIKVAGKRDPLKPVVRLRVLDAEEIKSMWVNVESCGLHLLTGLALKLVLVTGQRPGEVAGMHENEISGRLWTIPASRRGKTSTTQTVYLTDTALNIITVAKAELERLQGRRKGALSGYIFEAKGGSSITNSALPRGVQRSHEALGVKDNETWGHWTPHDLRRTMRTGLSACKIAPHIAELTIGHTKRGIVATYDQHTFDSERRDAMMAWELRLMTIVAGNNPDAIVDNVLKLEAKA

SEQ ID NO: 1746 - protein, 304 aa, Epibacterium mobile
MPPKSHSQLNNEEPSTSEFSQDLSENTRKAYATDWALYMQWCRMQGIPPLSATPDHIARYLTEISASSGLSSASVRRRLAGLVWNYHQRGFRLDRNSPLIADALSEITTNEQCATVIKDAITPQEIRAMVATLPFDLRGLRDRAILLTGYIGGLGRSDLIGLDLHQYDTEGGTGWIELHSEGILLTIRSKTGWRKVQIACGNTDLTCPVYTLTKWLHFAKIRSGPAFVRTSRDDKRALSTRLNDRHIPRLVKSTILKAGIRAELPEKERLALFSGHSLKKGLSVSVDQSSGNQIEVNLTKAAGF

SEQ ID NO: 1747 - protein, 323 aa, Pseudomonas vancouverensis
MTELDRYLQAATRDNTRRSYRAAIEHFEVTWGGFLPATADSVARYLVAHAGVLSINTLKLRLSALAQWHNSQGFADPTKAPVVRKVFKGIRALHPAQEKQAEPLQLQHLEQVVGRLEQEIQAAKAQADRPGLLRARRDLALILLGFWRGFRSDELCRLQIEHVQAVAGSGITLYLPRSKSDRENLGKTFQTPALQRLCPVQAYIDWITEAALVRGPVFRGIDRWGHLGEEGLHANSVIPLLRQALGRAGIAAEQYTSHSLRRGFATWAHQSGWDMKSLMGYVGWKDMKSAMRYIDASPFAGMALSAEKPVAAQIPNSSINTVG

SEQ ID NO: 1748 - protein, 280 aa, Blautia sp.
MRRDIITRAMIEEFQNYLWEHEKAKLTIQKYISEIENLKEFLQGQPIGKSRLLEYRGQLQERYKARTVNAKLSAINAYLVFSGMEACKVKLLKIQHCSFIEENKELSEAEYRRLLSSAGKLKNKRMYYLLLTFGGTGIRVSELPFITVEAVRTGRADINLKGKNRTVILPKKLTDKLSRYAKEQGIHTGAVFCTSSGKKLDRSNICHDMKKLCKEANVDVHKVSPHNFRHLFARCFYAVHKNLAHLADILGHSSVETTRIYVQTSIREHERIISKMKLVV

SEQ ID NO: 1749 - protein, 345 aa, Mycobacterium avium
MTPEPRALNDDESRYPGWFLAFMADRAVRKPSPHTLKAYRQDFIAIATQLAAAPDRVAYLTPDAITRDAMQAAFAAYADTHEAASIRRCWSNWNTLCDFLYTDDLITANPMPLIGRPKVPKSLPKGLGAETVSGLLEAIEADSGSQRRSNWPERDAALVLTAVLAGLRADELLHADVGDIRATTEGGGVIQVRGKGNKDRRIPVEQGLIKVLECYLDSRAVRFPADTKRRGPSAGIGAWPATAALFVGSDGHRITRGVLQYRVLRAFKNAGLNGQRAAGALVHALRHTFATELANSDVNVYMLMKLLGHESMVTSQRYVDGAGTQNRAAAAQNPLYGLIKQSREP

SEQ ID NO: 1750 - protein, 368 aa, Comamonas thiooxydans
MDSSKPSPFPVPVIFDANRLQIQDVLESALAPKAHEAIKELMHEGESSNTRSSYQSAMRYWAAWHLLRLGQPMQLPLRASTVLQFIIDHAQRQSGAGLLHEMPPEIDEALVAAGYKGKKGAPSHSTLVHRMAVMSKAHQVHAMPNPCQDGAVKELMSRTRKAYARRGELPQKKEALTRDVLEELLASCDDSLRGLRDRALLLFAWASGGRRRSEVAGADMRFLRTVANGEFIYTLSHSKTNQSGTDAPENHKPVTGRAAIALKAWLDGARITEGPIFRRIRKGGHVAEPLTPAAVRNIVKERCALAGVEGDFSAHSLRSGFVTEAGRRNLPLADTMALTGHHSVNTVLGYFRADSALNNQAARMLDED

SEQ ID NO: 1751 - protein, 353 aa, Methylobacterium sp.
MDLDRADPTPESPLEALALPVPPAAGLPPTDEILIERLEGHARAAHGAFADNTVRAFAADSRIFAAWCREAGRTMLPATPETIAAFIDAQAETKSRATVERYRSSIAALHRAAGLANPCADEIVRLAVKRMNRAKGRRQKQAEPLNRTSIDRMIAVKAVERLHRRVSEGEHGAPLIALRNIALVAVAYDTLLRRSELVSLSIEDLERGADGSGTVLVRRSKADQEGEGAIKYLAPDTMAHVEAWLAAAGLESGPLFRPLTKSGKVGARALGDRDVARIYRALASAAGLKIPRLPSGHSTRVGATQDMFAAGFELLEVMQAGSWKTPAMPARYGERLRAQRGAARKLATLQNRA

SEQ ID NO: 1752 - protein, 280 aa, Unknown
  source: /note="Description of Unknown: Clostridiales sequence"
MTTYVITAEMEILFGEYLEQDEKSKNTIEKYRRDLRKFVEYIDGEEVTKELVIGFKEYLVEHYAVNSVNSIIASLNRFMQFAGWQEFRVKQLKKQRQVYCPEEKELTKQEYFELIRTAKREGKEKIGLIIQTIGSTGIRISELPSITVQAVKNGVAQVDCKGKNRQVLLPRKLLVKLMHYIRKEHIQCGPIFITKQGNPLDRSNIWKEMKKICRLAGVNEKKVFPHNLRHLFAYSFYQMEKDIAKLADLLGHSNINTTRIYIVSSGVEHRKQIEKMNLLL

SEQ ID NO: 1753 - protein, 246 aa, Unknown
  source: /note="Description of Unknown: Enterobacterales sequence"
MNNVIPLQNSPERVSLLPIAPGVDFATALSLRRMATSTGATPAYLLAPEVSALLFYMPDQRHHMLFATLWNTGMRIGEARMLTPESFDLNGVRPFVRILSEKVRARRGRPPKDEVRLVPLTDISYVRQMESWMITTRPRRREPLWAVTDETMRNWLKQAVRRAEADGVHFSIPVTPHTFRHSYIMHMLYHRQPRKVIQALAGHRDPRSMEVYTRVFALDMAATLAVPFTGDGRDAAEILRTLPPLR

SEQ ID NO: 1754 - protein, 246 aa, Unknown
  source: /note="Description of Unknown: Enterobacteriaceae sequence"
MNNVIPLQNSPERVSLLPIAPGVDFATALSLRRMATSTGATPAYLLAPEVSALLFYMPDQRHHMLFATLWNTGMRIGEARMLTPESFDLDGVRPFVRILSEKVRARRGRPPKDEVRLVPLTDISYVRQMESWMITTRPRRREPLWAVTDETMRNWLKQAVRRAEADGVHFSIPVTPHTFRHSYIMHMLYHRQPRKVIQALAGHRDPRSMEVYTRVFALDMAATLAVPFTGDGRDAAEILRTLPPLR

SEQ ID NO: 1755 - protein, 294 aa, Bdellovibrio exovorus
MDHSLWIDFFDDLQNVRGRSKNTVMAYRRDLELYKKFTEKSKRVIEFFDFMKKEGLSTRSQARVISSVRTYLKFCESKGMKCPDLRELRPPKVKTGLPKAVSVEEFEKLFRACAVEGEARTARNQLTLLFLYGLGCRVSELIGLSLHDFSPTERWVKVLGKGSKERLIPLTDTLYNALEEYLKNHRSELMMDNKSNAALLLNDRGHRPSRVDIWRWLASWSAKAGFDEPVHPHRFRHGCATALLEGGADLRSIQVMLGHASIQTTQVYTAVTTNTATKAIDEHHPLSKIKDFSG

SEQ ID NO: 1756 - protein, 372 aa, Dinoroseobacter shibae
MEETPEIQPPDAEKSTSAPSDSNNQAQRDERDQVSTDPIALPAHVAGSGTLDRLVDTARDYARASTAENTNKAYAADWKHFARWCRLKGTDPLPPSPEMIGLYLTDLAAPAKGTPALSVSTIERRLSGLAWNYAQRGFSLDRKDRHIANVLAGIKRRHARPPVQKEAILPEDILAMVATLPFDLRGLRDRAILLIGFAGGLRRSEVVSLDVSKDDTPDSSGWIDVFEDGAVLTLNAKTGWREVEIGRGSSEQTCPVHALEQWLHFAKIDFGPVFTRTSRDGKRAMDERLNDKHVARLIKKTVLKSGIRAELPENERLALFSGHSLRAGLASSAEVDERFVQKQLGHASAEMTRRYQRRRDRFRVNLTKAAGL

SEQ ID NO: 1757 - protein, 328 aa, Acinetobacter sp. Root1280
MATFRQRKDSWRVEVSVKGVRDSGTFDTKTQAKAWAAKRETELRDQANGKLPSFTLQNAIDRYVREVSINKKAHYKEIARIKVFCKSYPNLCKKQISKITTDDLVQWRDSRLKEVQGATVRREATILSGIFTVAKKEWKWIYESPLTDLSMPPIAKSRDRRVTQDEIDRLCLAAMWDESTPTTSTQQTIIAFLLALETAMRAGEILTLTWDRVFLEERYVALDETKNGTKRNVPLSKRAVELIVHLKPLDKTMVFTCKRSSFSALWIDLKKKCKIEDLHFHDSRHEACTRLARKLDVLDLARMIGHKDLKSLMVYYNATATEIAHRLD

SEQ ID NO: 1758 - protein, 333 aa, Patulibacter minatonensis
MADAETTPDLDVEVVDALPTVVPSHLPGELQDLLDAAREYADAATAPNTVKAYQSDWRGFTAWCAQHRLQPLPADSMTVALYLTAMAKNGRKVTTIRRHTAAIARAHRDNGLPNPMWDPTAALVLEGIARTHRSAPKKKVALLRDPMVQLIDRIETDTPAGLRDRALLLLGFALGLRRSELVQILIEDLSPNADGLTIRLATSKTDQTGHGHEFLLPYAEPGRPCPVRAIRAWLDHTGLTHGPLIRRLHRNGIPGEALSPQSVALIVKRRAKAAGLNPADFAGHSLRAGFATQASRDGHRTEQITDVTRHRDRRTLDGYVRAGKGAEDVARVL

SEQ ID NO: 1759 - protein, 418 aa, Pseudomonas plecoglossicida
MGAQATRLSDLKVKAAKPKEKDYTLTDGNGLQMRVRINGSKLWNFNYIHPVTKKRINMGLGTFPEVSLAQARKRTVEAREIVAQGLDPKEQRDAERQAKKAATEHTFENVTTAWFELKKDSVTPAYAEDIWRSLTLHIFPDLGTTPISAINAPKVIDLLRPLETKGSLETVKRLTQRLNEVMTYGVNSGLIHANPLSGIRSVFKKPKKKNMAALPPDELKELMVAIANASIKRTTRCLIEWQLHTMTRPAEAATTRWADIDIEKKVWTIPAERMKKRRIHIVPLTDQALDLLEAIKPYSGHREYVFPADRNPRTHCNSQTANMALKRMGFEGRLVSHGMRSMASTILNEHAWDPELIEVALAHVDKDEVRSAYNRADYIERRRPMMKWWSEHIQEAATGNLSMSAVQNNRDRKVVSIR

SEQ ID NO: 1760 - protein, 359 aa, Klebsiella sp.
MQLNTVYSYSVTEAQVYNSFDIDRASENCSAETVEYLKQCQALTGKQIISLRGDSSFDEAFMLFTRLSLLVTRRRPELGVHCILIHAMPVIGGMKVEDMNRLAINRLINALVLDGKLVQSRRVFSVIKQFLGWCEFQGIIESSPLATMSLNKVAGGAKPKPRERVLSDDELEKFWHMWDFAEVSESTRWAARFILCSARRPDEVLRARRDEFDLHKDVWNQGERNKSGRDHSLPISPIMRMCIDKMIDAAGDSEWLVPSPKTTAKPASKVMVAQASRRIMAKKYLSDALPEPFEIRDLRRTARSSLSRLNVDQDVARKIMNHSLEGIDRVYNRHDYMDRMIEAMLAYSDFLMEKCKINQ

SEQ ID NO: 1761 - protein, 303 aa, Unknown
  source: /note="Description of Unknown: uncultured bacterium A1Q1_fos_2004 sequence"
MTELATITTNTIQPIINLVCNAVTSDHTKRAYSRALTDFIAWHSSTGQQGFGKATVQAHVTALRDAGVSASSINQRLTAIRKLAVELADNEVIDHSAAQAVGRVEGVRKEGKRLGNWLTKEQAQQLLTLQPIATVKGLRDRAILAVLLGCGLRREECTGLAVGNIQQREGRWVIVDLVGKRSKTRSVPMPAWCKYAIDAYLLAAAVTDGVLFRSVRRGDHITGQGMTAQAIFDVVKDYAKEIGVDVRPHDLRRTFAKLAHKGNAPIEQIQLSLGHSSVQTTERYIGVQQDLSSAPCDALGLRI

SEQ ID NO: 1762 - protein, 352 aa, Salinimonas sediminis
MSYLATSPIDGFVSVYKEAVNKYFKDIFTKLPHNTQRAYVSDFNEFAIFCEQEGLTGFNDSMQNNEDCIKRYVEVLCHSPLAYRTIKRRLSALSKFLGIAQLPNPIVNSVYLKDFVKLSLSQNEKYQLSSHQAVPLTVDILEKINNNVIPDTLLEMRDLAIINLMFDGLLRADEVVRVRTEHINKRNNALLVLTSKSDQTGKGSYRFISNSTVAMIDEYINEANYNKALQQERDSSDPRRINHGILFRRVSNRGHALLPYDEQLKGKHSPILEYSSIYRVWKRIADMAKVKENITPHSGRVGGAVSLAENGATLPEMQLAGGWHSPEMPGHYGQQAAVGKGGMAKLAQLKGR

SEQ ID NO: 1763 - protein, 335 aa, Unknown
  source: /note="Description of Unknown: Alteromonadaceae sequence"
MNTKPPKMATDLALRNEESNQIAHRESESLRHYLQAATSDNTRKAYRSAIRQFEKWGGRLPTDRDTVVRYLLARAESLNARTLDLHLTAISQWHHYQGVTDPVRDPLVRKTMEGIRRTHGQPKRKAKALRLEHIAQMVDYLRCLPDSKKKHRDIALVLTGFFGAFRRSELVAIQISDLNWEPEGLIIRLPRSKTDQQAAGLARALPFGTPGCCPATAIKAWMDSAEIDSGPLFRPANRWDQVTPRPLNPGAINDLLKTLGKACQFDFVPELSSHSFRRGLSTSAARERVDFELIKKQGGWKSDATVWEYIEEGQQLSNNASLILMEKLVTLIDPV

SEQ ID NO: 1764 - protein, 300 aa, Parageobacillus sp.
MENSKIALQLFIEYLQIEKNYSQYTIVCYRQDIEQFFEFMNEQGIQHLHEVTYSDVRLYLTKLYGQKQSSRSISRKMSSLRSFYKFLLRERKVKENPFALAALPKKEQKIPNFLYPQELECLFHVNDVNTAIGQRNQALLELLYATGVRISECCHIQLSDIDFSVSTILIHGKGSKQRYVPFGRFAKEALERYIRQGRRELLENAKTEHAYLFVNARGNPLTPRGARYILDEIVKKAALTQHISPHVLRHTFATHLLNEGADMRTVQELLGHAHLSSTQVYTHVTKDRLRHIYLHTHPRA

SEQ ID NO: 1765 - protein, 341 aa, Kibdelosporangium phytohabitans
MRIVGGYRYQDHVLLLLDAQDAFFLARKPRKDSPHTTAAYRRDLSGITTLLAGTTGRPVEHLTIQDLTVQALRTAFGDFADGHAKSSVARAWSTWNQFLNFCVADGMLDGNPMGAVVRPKAPLPSPKPLRGEDTPERLIAAAAAGARKARDPWPERDVLVIALGLVAGLRSAEVRALQRCSIVGRPGEQRLHVQGKANRERSIPIEAPLERVIGAYLASCEVRFPHQRFGPVSALLLDYQGKPIGRGALDYLVKTSYQWAGIRDQVPTGANLHALRHTFATRLAEDGANAAEIMALLGHANLNTSQNYIEATGRERRAAAAGNRTYRALSGLEPGTTSPDS

SEQ ID NO: 1766 - protein, 304 aa, Sebaldella termitidis
MENKTVAMEFLDYLRYEKGSSENTLSSYKRDLNLFFSEVPKNFQSIEDEEVIEYVDKLSKTVKRNTVLRKIASIRAFYKFCYINKYITDNPTESLKNLKREFKLPEVLKLSEIKDIIDAIPNTPEGVRDKIIIKILVATGARISEVLTLDIKDVENQDYEFIRVLGKGSKYRLIPIYSQLEEEIKAYIENDRKILVLERKEKESENKNKKKGHELEYKLFLGTRRENFWKRLKKYAKNAKIEKNVYPHIFRHSVATMLINNGADIRIVQEILGHVNISTTEIYTHVGKRELKEIYNKVKIGDEE

SEQ ID NO: 1767 - protein, 412 aa, Sphingobium bisphenolivorans
MGTDTAREERESVVAAAETALTPIAPFGDLPWAIVQMRAVEPIVVNEALIAAYQAASSPHSVRALRSDIEAFDAWCRRTQRIALPATPEMVADYLDARAGEGAKPASLGRYKASIAKVHQLLELKDPTQAPLVKLRLAAIRRRTGTAQKQARPLRFKGPVKDVERDQARGLNIRALLEACGDDLPGLRDRALLSAAYDTGLRASELVAVAVEHIVDALDPEARLLEIPRSKADQEGEGATAFISPRSVRAIAAWRAASGIAAGPLFRRVQVRRYKARLADPGRPIASISGREAWDLRKTLPKRAMAARVEYDVGEAALHPGSIGPIWRRIIQRAFDRGALGDLTADDLVRLLKGISAHSTRVGLNQDLFASGEGLTGIMDALRWKSPRMPLAYNRNLAAEQGAAGRLMAKLG

SEQ ID NO: 1768 - protein, 376 aa, Arthrobacter sp. QXT-31
MASIWERKKADGSTSFTVRWRNPKTRKQEGITFSTAAEAQTLKRLLDANDQSFEIAQHAMVKNQTKAPTVAAVIQEHIDLLVRPSVGTVHTYQTMLKLHIADVIGHIPVDKLDYRHVTHWIKSMQAKGRSPKTIKNNHALIYGAMETAVMLRYRKDNPCQRVQLPSSEKAEDEARFLTHAEFGLILECMGERYKAFTEFLVMTGLRFGEATAVTVGDIDLMSKPATMRINKAWKRGTNSEFYIGATKTGAGKRTVSLNPQLVEILVPLVASRPGSDLLFTTPKGERIIHKLYWHHYWVPAVAAAQARGLKKSPRIHDLRHTHASWLIQDGVSLFTVSRRLGHASTRTTEQVYGHLMPQALQDAADAVERSAVIWRS

SEQ ID NO: 1769 - protein, 342 aa, Escherichia coli
MGELVIPGGSGGFLRDIGTEYQEAAKNFMQFMNDQGAYAPNTLRDLRLVFHSWARWCNSRQRPWFPITPEMAREYLLQLHEADLASTTIDKHYAMLNMLLSQCGLPPLSDDKSVSLAMRRIRREAATEKGERTGQAIPLRWDDLKLLDVLLSRSERLVDLRNRAFLFVAYNTLMRMSEISRIRVGDLDQTGDTVTLHISHTKTITTAAGLDKVLSRCTTAVLNDWLEVSGLREHPDAVLFPPIHRSNKARITTTPLTAPAMEKIFSDAWGLLNKRDATPNKGRYRTWTGHSARVGAAIDMAEKQVSMVEIMQEGTWKKPETLMRYLRRSGASVGANSRLMDS

SEQ ID NO: 1770 - protein, 342 aa, Escherichia sp. KTE52
MGELVISGGSGGFLRDIGTEYQEAAKNFMQFMNDQGAYAPNTLRDLRLVFHSWARWCNSRQHPWFPITPEMAREYLLQLHEADLASTTIDKHYAMLNMLLSQCGLPPLSDDKSVSLAMRRIRREAATEKGERTGQAIPLRWDDLKLLDVLLSRSERLVDLRNRAFLFVAYNTLMRMSEISRIRVGDLDQTGDTVTLHISHTKTITTAAGLDKVLSRYTTAVLNDWLEVSGLREHPDAVLFPPIHRSNKARITTTPLTAPAMEKIFSDAWGLLNKRDATPNKGRYRTWTGHSARVGAAIDMAEKQVSMVEIMQEGTWKKPETLMRYLRRSGASVGANSRLMDS

SEQ ID NO: 1771 - protein, 342 aa, Escherichia coli
MGELVISGGSGGFLRDIGTEYQEAAKNFMQFMNDQGAYAPNTLRDLRLVFHSWARWCNSRQRPWFPITPEMAREYLLQLHEADLASTTIDKHYAMLNMLLSQCGLPPLSDDKSVSLAMRRIRREAATEKGERTGQAIPLRWDDLKLLDVLLSRSERLVDLRNRAFLFVAYNTLMRMSEISRIRVGDLVQTGDTVTLHISHTKTITTAAGLDKVLSRYTTAVLNDWLEVSGLREHPDAVLFPPIHRSNKARITTTPLTAPAMEKIFSDAWGLLNKRDATPNKGRYRTWTGHSARVGAAIDMAEKQVSMVEIMQEGTWKKPETLMRYLRRSGASVGANSRLMDS

SEQ ID NO: 1772 - protein, 342 aa, Escherichia coli
MGELVISGGSGGFLRDIGTEYQEAAKNFMQFMNDQGAYAPNTLRDLRLVFHSWARWCNSRQRPWFPITPEMAREYLLQLHEADLASTTIDKHYAMLNMLLSQCGLPPLSDDKSVSLAMRRIRREAATEKGERTGQAIPLRWDDLKLLDVLLSRSERLVDLRNRAFLFVAYNTLMRMSEISRIRVGDLDQRGDTVTLHISHTKTITTAAGLDKVLSRYTTAVLNDWLEVSGLREHPDAVLFPPIHRSNKARITTTPLTAPAMEKIFSDAWGLLNKRDATPNKGRYRTWTGHSARVGAAIDMAEKQVSMVEIMQEGTWKKPETLMRYLRRSGASVGANSRLMDS

SEQ ID NO: 1773 - protein, 382 aa, Propionibacterium freudenreichii
MAGKRAFGQIDRLPSGNYRARYVGPDLVLHKAPHTFTNKSHAERWLLDEQDLISRDVWEAPEVRTAKPRALTVGEWISKVIERRANRTRRPLAQTTIDLYRKDYRLRISETLCAVRLADLTPAMVATWWHALPDTPTQNARAYALLRSAMSDAMEDELIERDPCRLKEAGKPTPAHTGEAITVPELFTYLEAVPESRRLPLMIAALCGLRSGEVRGLRRRDVDLKAGMLHVEQAVSRVRADNHRWEWRIAPPKTAAGVRTVALPSPVTDALRTWLKEAPVNGWDGLLFPATDGHSPMPGTVLRDAHVKGREAIGRQTLTIHDLRRTAATLAAQGGATTKELMRLLGHTTVSVAMLYQVADEERDRARAQRLTQQLREGQAGQ

SEQ ID NO: 1774 - protein, 388 aa, Novosphingobium pentaromativorans US6-1
MTALILVPMTTDPPEPLALPSPAAAPPDPSVAQVVEDVRDLVGAGIRLDQELVAAAVRGWSNNTRRAFCSDLKVWGDWCRRHGIAPVRATQSDVAAYIRALSGIDPSAEKVRAMATIERYVSYIGRAYRMAGLADPTAGELVTLEKKAARKKRGVRQRQARAIRFKGDIADFDSPPSGVCLAHLIKAVRRDVMGLRDEALLRVAYDVGARRSELVAIDVDHIHGPDAGGAGALFVPTSKTDQEGEGAWAYLSPATMKAIARWREAAHIDKGPLFRRIETHFDGSIAAIGTKRLHPNSITLLYKRLVQRAFDKKLLGPMSEAEVARWVAAVSSHSLRVGVAQDNFAARESLPAIMQAYRWRDPKTVLRYGAQLAAKSGASARMAVRVGE

SEQ ID NO: 1775 - protein, 380 aa, Novosphingobium pentaromativorans
MTTDPPEPLALPSPAAAPPDPSVAQVVEDVRDLVGAGIRLDQELVAAAVRGWSNNTRRAFCSDLKVWGDWCRRHGIAPVRATQSDVAAYIRALSGIDPSAEKVRAMATIERYVSYIGRAYRMAGLADPTAGELVTLEKKAARKKRGVRQRQARAIRFKGDIADFDSPPSGVCLAHLIKAVRRDVMGLRDEALLRVAYDVGARRSELVAIDVDHIHGPDAGGAGALFVPTSKTDQEGEGAWAYLSPATMKAIARWREAAHIDKGPLFRRIETHFDGSIAAIGTKRLHPNSITLLYKRLVQRAFDKKLLGPMSEAEVARWVAAVSSHSLRVGVAQDNFAARESLPAIMQAYRWRDPKTVLRYGAQLAAKSGASARMAVRVGE

SEQ ID NO: 1776 - protein, 324 aa, Streptomyces sp. CFMR 7
MPTVVQLPAGKVLTVRAAADAFLDSLRNPNTVRSYGVGVGKTAERIGEARPLGSVADDEIGEALELLWGTAAVNTWNARRAAVLSWLGWCAEYGYDSPSVPAWTKRLAVPDSETPARSKMAVDRLIARREVHLREKTLWRMLYETCARAEEILGVNIEDLDLAARRCPVKAKGARSKARRRGQAREDFVLETVYWDAGTARLLPRLLKGRTRGPVFVTHRRPGPGKVVSPRDVCPDTGLARLSYGQARALLDERTAVHGPGTGWDLHEYRHSGLTELGVQGASLLMLMAKSRHKKPENVRRYFHPSPEAISELTSLLAPGDGRR

SEQ ID NO: 1777 - protein, 395 aa, Nitratireductor sp. ES.061
MSSDNEQNPRMPGMIQPAAPERPSNRVAASGNDGTSALKSGKPAGDHSDLPDLIDVVLAMDEEPPSPTRRSPALPSNVDPLVETARSYARAARSEATQRAYAADWRHFASWCRRSGFQPLPADPQVVGLYLTACASANPRPTVSTLERRLSGLSQGYSQRGDRLDRKDPHIAEVFAGIRRKHGRPPAQKEALLAEDILAMLETLPHDLRGLRDRAILLVGFAGGLRRSEIVGLDAGVDQTEDGNGWAELFDKGILITLRGKTGWREVEIGRGSADRSCPVEALRTWTRLARIAHGPLFRRIRGQKTVEDSRLNDRHIARLVKRTAFDAGLRPDLPEKERERLFSGHSLRAGLASSAEVDERFVQKQLGHTSAEMTRRYQRRRDRFRVNLTRASGL

SEQ ID NO: 1778 - protein, 385 aa, Nitratireductor sp. ES.061
MPGMIQPAAPERPSNRVAASGNDGTSALKSGKPAGDHSDLPDLIDVVLAMDEEPPSPTRRSPALPSNVDPLVETARSYARAARSEATQRAYAADWRHFASWCRRSGFQPLPADPQVVGLYLTACASANPRPTVSTLERRLSGLSQGYSQRGDRLDRKDPHIAEVFAGIRRKHGRPPAQKEALLAEDILAMLETLPHDLRGLRDRAILLVGFAGGLRRSEIVGLDAGVDQTEDGNGWAELFDKGILITLRGKTGWREVEIGRGSADRSCPVEALRTWTRLARIAHGPLFRRIRGQKTVEDSRLNDRHIARLVKRTAFDAGLRPDLPEKERERLFSGHSLRAGLASSAEVDERFVQKQLGHTSAEMTRRYQRRRDRFRVNLTRASGL

SEQ ID NO: 1779 - protein, 385 aa, Nitratireductor aquibiodomus
MPGMIQPAAPERPSNRVAASGNDGASALKSGKPAGDHSDLPDIIDVVLAMDEETPSPTRRSHALLSNVDPLVETARSYARAARSEATQRAYAADWRHFASWCRRSGFRPLPADPQVVGLYLSACASASPRPTVSTLERRLSGLSQGYSQRGDRLDRKDPHIAEVFAGIRRKHGRPPAQKEALLAEDILAMLETLPHDLRGLRDRAILLVGFAGGLRRSEIVGLDAGVDQTEDGNGWAELFDKGILITLRGKTGWREVEIGRGSADRSCPVEALRTWIRLARIAHGPLFRRIRGQKTVEDSRLNDRHIARLVKRTAFDAGLRPDLPEKERERLFSGHSLRAGLASSAEVDERFVQKQLGHTSAEMTHRYQRRRDRFRVNLTRASGL

SEQ ID NO: 1780 - protein, 320 aa, Alteromonas lipolytica
MQSPFINAVYEFMMLKRYAKRTIQSYLVWIADFIRFHKYQHPKTMGDQEVSLYLTHLSVKRNLSASTQASALNALVFLYNKYLLQPLSKEMEFVNSGRKPKLPTVLTISEVQQLLTNIPERQSLPVSMLYGSGLRLMECVRLRVKDIDFDYRCVRIWQGKGGKHRVVTLSDTLIAPLKTQKEKVRHLLERDCSNPEFAGVWMPHQLAKKYKSANKSLEWQYLFPASKTSIDPESALRRRHHIDEKQLQRAVRQTAQEIGLQKSVTPHTLRHSFATHLLLKGADIRTVQEQLGHSDVRTTQIYTHILQRGGSAVVSPLESI

SEQ ID NO: 1781 - protein, 343 aa, Pantoea rodasii
MTELTPFSGPLIPGDADMADRLREFVQDREAFSDNTWRQLLSVMRTGSRWADEHGRRFLPMTPADLRDYLLWLQATGRASSTITTHAALISMLHRNAGLVPPNRSPVVFRAVKRIHRTAVISGERAGQAVPFRIGDLLTLDKSWCFSDRLQQLRDLAFLHVAYATLLRVSELGRLRVRDISRAPDGRIVLDVAWTKTIVMTGGLIKGLGDLSSQRLTAWLTVSGLIAEPDAFIFGPVHRTNRALPATEKPLTTRALEDIFARAWQEAGPGQDAKPNKNRYRGWSGHSTRVGAAIDMATKKYSTAQIMQEGTWKKAETVMRYIRHVDAHAGAMVEFMDKHYSGN

SEQ ID NO: 1782 - protein, 345 aa, Pantoea sp.
MDDFRPHLPVSDAQLPGQADVVAQLREFVQDREAFSDNTWRQLLSVMRICAGWAKEYGRTFLPMTPECLRDYLMWLQANGRASSTIGTHLALISMLHRNAGLTPPHASPLVFRAMKKISRTAVVSGERTGQAIPFRLTDLLTLDARWSGSDSLQHQRDLAFLHVGYSTLLRVSELGRLRVRDVSHASDGRIVLDVGWTKTIVMTGGLIKGLGALSTQRLREWLNASGLINEPDAFIFSPVHRTNRAKINTDRPLSTRSMEDIFARAWHEAGPAADVKPNKNRYRRWSGHSARVGAAIDMATNKYSTAQIMQEGTWKKAETVMRYIRHVDAHSGAMVDFMDAHVGR

SEQ ID NO: 1783 - protein, 366 aa, Bacillus thuringiensis
MSNREKQVYQARVERHKEKMPWYIIEYIEEKTNLSPTTLYGYLIEYEIFLQWLISSHLATSDGEVVTKIHEVPIETLEHLPLKQVKRFKSYLERQGNKTKAVIRTFSALKSLFNYLTSNTEDDNGECYFYRNVMAKMEIHKEKIDAAARAKEISEVIFHNNDDIKFMRFLSNEYEQMLQETAPGKLRFFKRDRERDIAILSLILGTGLRVSEVASLTISSINFRTRYIKVIRKGDKKSSILATQTALDDVQEYLKVRANRYKCPDDEDILFVTNYKGSYAQISVNAIQKLTEKYTRAYDEKKSPHKLRHTYATNHYNENKDLVLLANQMGHNSMETTSLYTNIDDTKRRAAIERLEQRQFEDTKEK

SEQ ID NO: 1784 - protein, 390 aa, Rhizobium sp. BK463
MPKPKALPSPADPVLARAEELDALDAILPFARRDQLAALLTDEDVATLKHLAKEGMGDNTLRALASDLGYLEAWCELSTGAPLPWPAPESLLLKFVAHHLWDPVERAEDPSHGMPDDVEMGLRAKGLLRADGPHAPDTVRRRLTSWSILTRWRGLTGSFTAPSLKSALRLAVRASARPRRRKSKKAVTGQILAKLLATCDGERLVDLRDRALLLTAFASGGRRRSEVAGLRVEDLVDEEPVHADPRNAASPLLPCLTINLGRTKTMTAEDRVHVVLIGRPVEALKQWTEEARIDAGPVFRRIDQWGNIDRRALTPQSVNLILKTRCSQAGLDPELFSAHGLRSGYLTEAANRGVPLQEAMQQSLHKSVAQAASYYNNAERKNGRAARLVI

SEQ ID NO: 1785 - protein, 386 aa, Ensifer sp. AP48
MAKTTPSDAIHRRAEDLDALDSILPFDRRDQLAALLTDDDVATLKHLANEGMGDNTLRALTSDLGYLEAWCQLATGSPLPWPAPESLLLKFVAHHLWDPAKRAEDADHGMPADVEAGLRDSRLLRAKGPHAPDTVRRRLTSWSILTRWRGLTGTFNGPSLKSALRLAVRASARPRQRKSKKAVTADILAKLLQACAGDRLVDLRDQALLLTAFASGGRRRSEIAGLRVADLVDEEPVRADPNDANSPALPCLSIRLGRTKTTTSDDDEHVVLIGRPVVAIKHWLEQANVKDGPVFRRIDQWGNIDRRSLTPQSVNLILKTRCKQAGFDPALFSAHGLRSGYLTEAANRGIPLPEAMQQSLHKSVTQAARYYNDAERKQGRAARLMI

SEQ ID NO: 1786 - protein, 394 aa, Mesorhizobium waimense
MPKNPARAGGRQSTELVARRAEALDALDSVLPFDRRDFLAGLLTDDDVATLRHLAKEGIGANSLRALASDLGYLEAWSLAATGFSLPWPAPEALLIKFVAHHLWDLAKRETDPAHGMPADVAATLKSQALLRTDGPHAPATVRRRLSSWSTLTKWRGLRGKFNAPGLQSAIKLAVRASARPRGRKSKKAVTADILTALLKACAGDRLVDVRDRALLITAFASGGRRRSEMASLRFEQIVEEEPVPAEPKAPDSSDKLPCLSIRLGRTKTTQADSDAFVLLVGRPVLALKGWLERAGITEGAVFRGIDRWGNLEKRALTPQAVNLLLKRRIAEAGLDPQAFSAHGLRSGYLTETARRGIPLPEAMQQSQHRSVQQASNYYNDAERTLGRAARVII

SEQ ID NO: 1787 - protein, 370 aa, Bosea vaviloviae
MPSSQASPPKIDGMAVARINGEQPDIAEPVIEIGAAEPATLIPARLEALVETATGYAKAASSENTRAAYAKDWRHFSSWCRREGLEPLPPSSQVIGLYISACAAGEPKRGLPSLSVATIERRLSGLGWNFNQRGQPMDRADRHISTVLAGIRRKHAKPPRQKEAVLGDDLLAMIATLGHDLRGLRDRAILLLGFAGGLRRSEIVGLDVVRDDNSDGAGWIEIYADKGVLVTLRGKTGWREVEVGRGSSDHTCPVVALESWVRFGRIARGPLFRRIFKDNKTVDVERLSDKHVARLVKQTVLEAGVRSDLPEGERALLFAGHSLRSGLASSAEIEERYVQKHLGHASAEMTRKYQRRRDRFRTNLTKASGL

SEQ ID NO: 1788 - protein, 388 aa, Bosea sp. OK403
MTSIALLSTETETRRALQLDALAGILPLERRDKLAHILTDDDVATLRHLAREGMGENSLRALASDLAYLEAWSLASTGSALPWPAPEALVLKFVAHHLWDPAQRESDPAHGMPAEVDEVLRAGDHLRSAGPHASSTVKRRLAHWATLHRWKGLESPLGTPAIRTSVRLAVRASAKPRRRKSKRAVTRDILDRLIATCQSDRLADTRDLAILLVAFASGGRRRSEVARLRLEQLTLEADVPLDPDDPNSARLPCMAIALGRTKNSQADDDARVLLIGPPVEALREWLERAAISKGAVFRAIDRWEAIDDRALTPQAINLILKRRCALAGLDPVAFSAHGLRSGYLTEAARNGVALPAAMRQSQHRSVQQAARYYNDADQALGKAARLAI

SEQ ID NO: 1789 - protein, 388 aa, Bosea sp. Root483D1
MTSTSLLSAETETRRALQLDALAGILPLERRDKLATILTDDDVATLRHLAKEGMGENSLRALASDLAYLEAWSFASTGSALPWPAPEALVLKFVAHHLWDPTQRESDPAHGMPAEVDAALRAGDHLRSEGPHAPSTVKRRLAHWATLHRWKGLESPLGTPAIRTSMRLAVRASAKPRRRKSKRAVTRDILDRLIATCQTDRLADTRDLAILLVAFASGGRRRSEVARLRLEQLTLEADVPLDPDDPNSPRLPCMAIALGRTKTAQADDDARVLLIGPPVAALREWIERAAIKTGAVFRAIDRWEAIDDRALTPQAINLILKRRCAMAGLEPIEFSAHGLRSGYLTEAARTGVTLPAAMRQSQHRSVQQAARYYNDADQALGKAARLAI

SEQ ID NO: 1790 - protein, 388 aa, Bosea sp. BK498
MTTTALLSADSETRRALQLDALAAILPLERRDQLAKILTDDDVATLRHLAQEGLGENSLRALASDLAYLEAWSLASTGSALPWPAPEALVLKFVAHHLWDPAQRETDPAHGMPAEVDAVLRSGDHLRSDGPHAPSTVKRRLAHWATLHRWKGLMGPFAAPSLRTAMRLAVRASARPRRRKSQRAVTREILDRLLATCRSDRLSDTRDLALLLTAFGSGGRRRSEIARLRVEQLSEEAPVPLDPEDLNSPRLPCLAITLGRTKTAMANDDARVLIVGPPVEALREWLERANISKGAVFRAIDRWEGLSDRALTPQAVNLILKRRCAQAGLNPWEFSAHGLRSGYLTEAARNGVSLPAAMQQSQHRSVQQAASYYNEADRQLSKAARLAL

SEQ ID NO: 1791 - protein, 339 aa, Sinorhizobium sp. GL28
MVSAVESPSPLPAHLEDLADRARGYVEAASSANTRKAYASDWKHFSAWCRRQNLAPLPPDPHVVGLYITACASGTTERSVKANSVSTIERRLSAIAWNCTQRGQPLDRKDRAIATVMAGIRNRHAAPPRQKEAILPEDLIAMLETLERGTLRGLRDRAILLIGFAGGLRRSEITGLDLGRDQTEDGRGWIEILDKGLLLTLRGKTGWREVEIGRGSADTTCPLVAVETWIRFAKLAKGPLFRRVTGRGKDVGPDRLNDKAVARLVKSAALAAGLHGDLGEDERAARFSGHSLRAGLASSAEVDERHVQKQLGHASAEMTRKYQRRRDRFRVNLTKASGL

SEQ ID NO: 1792 - protein, 370 aa, Sinorhizobium sp. GL28
MAQIVAQNRKNHAKETSAPSDSTAHSGDDPALVSAVESPSPLPAHLEDLADRARGYVEAASSANTRKAYASDWKHFSAWCRRQNLAPLPPDPHVVGLYITACASGTTERSVKANSVSTIERRLSAIAWNCTQRGQPLDRKDRAIATVMAGIRNRHAAPPRQKEAILPEDLIAMLETLERGTLRGLRDRAILLIGFAGGLRRSEITGLDLGRDQTEDGRGWIEILDKGLLLTLRGKTGWREVEIGRGSADTTCPLVAVETWIRFAKLAKGPLFRRVTGRGKDVGPDRLNDKAVARLVKSAALAAGLHGDLGEDERAARFSGHSLRAGLASSAEVDERHVQKQLGHASAEMTRKYQRRRDRFRVNLTKASGL

SEQ ID NO: 1793 - protein, 349 aa, Rhizobium sp. PP-CC-3G-465
MMADNTNLNADMPRPAPSPSLPGHLQDLTDRARGYVEAASSANTRKAYASDWKHFAAWCRRSSLPLLPPHPQTIGLYITACSSGTAERGGKPNSVSTIGRRLSSLSWNYTQRGQQLDRKDRHIATVMAGIRNSHARPPVQKEAVMAADIIAMIETLDRSTLRGMRDRAMLLVGYAGGLRRSEIVGLDVKADQTEDGRGWIEIFDKGMLVTLRGKTGWRQVEVGRGSSDATCPVVAVETWIRFAKLGHGPLFRRVTGQGKSIGAERLNDKEIARLVKRAVVAAGVRGDLSELERALKFSGHSLRAGLASSADVDERYVQKQLGHASAEMTRRYQRRRDRFRINLTKAAGL

SEQ ID NO: 1794 - protein, 388 aa, Bosea vaviloviae
MTSIALLSTESDTRRALQLDALAGILPLERRDQLAKILTDEDVATLRHLAREGMGENSLRALASDLAYLEAWSLASTGSALPWPAPEALALKFIAHHLWDPARRAEDFSHGMPADVEASLRAGDHLRSDGPHASSTVKRRLAHWATLHRWKGLESPLGTPAIRTGLRLAVRASAKPRRRKSKRAVTRDILDRLIATCQSDRLADSRDLAILLVAFGSGGRRRSEVARLRLEQLTIEADVPLDPDDQDSARLPCMAIALGRTKNSQADDDARVLLIGPPVEALREWLERAAISKGAVFRAIDRWEAIDDRALTPQAINLILKRRCAQAGLDPIAFSAHGLRSGYLTEAARNGVALPAAMRQSQHRSVQQAARYYNDADQALGKAARLAI

SEQ ID NO: 1795 - protein, 368 aa, Mesorhizobium sp.
MENPPSKPAKKDLPAADRPDGDLPDIVDLVMEMGRTAPRVPAHVEDLVETAKGYANAASSENTRDAYAKDWRHFTSSCRRTGFDPLPPDSKTIGLYISACARGEPKHGSPPLSVATIERRLSGLAWNFIQRGFVMDRADRHIATVLAGIRRKHAKPPRQKEAVLGDDLLAMIATLGHDLRSLRDRAILLLGFAGGLRRSEIVGLDVTREETSDGAGWIEIFPDKGVLVTLRGKTGWREVEVGRGSSDLSCPVAALESWIRFGRIARGPLFRRIFKDNKTVDVGRLSDKHVARLVKKTALAAGVRSDLPEGERGLLFAGHSLRSGLASSAEIEERYVQKQLGHASAEMTRKYQRRRDRFRTNLTKASGL

SEQ ID NO: 1796 - protein, 408 aa, Chelativorans sp.
MASHIDQNSENRTRHRSAQPQETPPGVDETAPAGSAEHDASIADDMPDIIDVVLEMGRAPEEPPDGAPSPALPVVSTPRLPAHLDALADRARDYVEAASSSNTRRAYASDWKQFASWCRRQGVEMFPPDPQVVGLYIAACASGKATGDRKPNSVSTIERRLSALTWNYAQRGQPLDRKDRHIATVMAGIRNKHAAPPRQKEAVLPEDLIAMLETLDRGTLRGLRDRAMLLLGFAGGLRRSEVVGLDCGRDQTEDSSGWIEILDKGMLLRLRGKTGWREVEVGRGSSDTTCPVVALETWLKLARIAHGPLFRRVTGQGKKVGADRLNDQEVARLVKRTALAAGVRGDLPEGERGMKFAGHSLRAGLASSAEVDERYVQKQLGHSSAEMTRKYQRRRDRFRVNLTKASGL

SEQ ID NO: 1797 - protein, 421 aa, Mesorhizobium sp.
MPSVDEARATASLVDQNPENRARRSSAQPQETATPVDQDAVDQTAAAPSAEPNGSSTDDLPDIIDVVMEMGRAPEQPSADAPSALPVVANARLPAHLDALADRARGYVEAASSANTRRAYASDWKQFASWCRRQGVEMFPPDPQVVGLYVTACASGKATGDKKPNSVSTIERRLSSLTWNYAQRGQPLDRKDRHIATVMAGIRNKHAAPPRQKEAVLPEDLIAMLETLDRGTLRGLRDRAMLLLGFGGGLRRSEVVGLDVGRDQTEDSSGWIEILDKGMLLRLRGKTGWREVEVGRGSSDTTCPVVALETWLKLARIAHGPLFRRVTGQGKSVGADRLNDQEVARLVKRTALAAGVRGDLPEGERGMMFAGHSLRAGLASSAEVDERYVQKQLGHTSAEMTRKYQRRRDRFRVNLTKASGL

SEQ ID NO: 1798 - protein, 407 aa, Mesorhizobium loti
MASLVDQNPEKHTQHGSAQPQETAPGVDQIAQAGSAGHDTPIADDLPDIIDVVLEMGRAPEEAPADTPSPLPVVANPRLPAHLDALAGRARDYVEAASSANTRRAYASDWKQFASWCRRQGVEMFPPDPQVVGLYITACASGKAPGEKKPNSVSTIERRLSSLTWNYAQRGQPLDRKDRHIATVMAGIRNKHAAPPRQKEAVLPEDLIAMLETLDRGTLRGLRDRAMLLLGFAGGLRRSEVVGLDCGREQTEDSSGWIEILDKGMLLRLRGKTGWREVEVGRGSSDTTCPVVALETWLRLARIAHGPLFRRVTGQGKAVGADRLNDQEVARLVKRTALAAGVRGDLPEGEREKLFAGHSLRAGLASSAEVDERYVQKQLGHTSAEMTRRYQRRRDRFRVNLTKASGL

SEQ ID NO: 1799 - protein, 353 aa, Mesorhizobium sp.
MNQPTADDLPDIVDLVMEMGQPVRPPAHVEALVETAKGYAKAASSENTRNAYAKDWRHFTSWCRRQGFEPLPPDPKIIGLYISACAAGEPKHGAPALSVSTIERRLSGLAWNFTQRGFAIDRADRHISSVLAGIRRKHAKPPRQKEAVLSDDIKAMVNTLGHDLRSLRDRAILLLGFAGGLRRSEIVGLDVVRDDHSDGNGWIEFFPGQGVLVTLRGKTGWREVEVGRGASDQTCPVAALESWIRFGRIARGPLFRRIFKDNKTVDVERLSDKHVARLVKRTALAAGVRSDLPEGERAGLFSGHSLRAGLASSADIEERYVQKQLGHASAEMTRKYQRRRDRFRTNLTKASGL

SEQ ID NO: 1800 - protein, 342 aa, Piscirickettsia salmonis
MSSKQIKKIMTAESRTEISTTLSSSSRQFLENTLAQATKRGYAADLKIFFAWAEAHQTAAIPATAETIANFLADQASGVLSVWLRQESQLINGRPVSVATLRRRLAAIKYAHKLNKIEPSPTDTAEVRETLKGIRRTLGAKPNAKSALMSQDIQLLMRYIPETITGQRDRAILLLGFAGALRRSELTSLELSDIEVQENGMLVYIRSSKTDQEQQGQVIGIARSENKANCPVGAIEQWLQSSMILSGPIFRRIFANGKIAITTLSDRTIYNIVKNYCQLAGLDASRFGAHSLRRGFVTSAAKAKVDPFRIMAVTRHKRLETVKRYVDEANLINDYPGADLLK

SEQ ID NO: 1801 - protein, 350 aa, Hymenobacter psychrotolerans
MSEDLSLLPASDASHSLSHHLGRASAKVAGFLEAGLQGAANTERAYTSDLKSYVTFCEQHGFVAVPAEVETITEYVAYLASEKVEPAPGGSRGKKKGQQPLTGPHALATIKRHLAAIRKAHQLAGHRLPATLDALNIVMEGIARTLGKRQEQAQAFTVEELKQAIRRIDLETSAGLRDRALLLLGFAGAFRRSELVDLNIEQLEFTERALLVHLAKSKTNQYRAVEDKAIFYAPNADYCPVRCLRAWLGLLGRTTGPLFVKIPRASPGQMAAPSDKRLSDISINKLVQKRLGPDYSAHSLRVSFVTVAVLNGQSHKAIKNQTKQKTDAMIERYTQLNNVVSYNAAQALGL

SEQ ID NO: 1802 - protein, 354 aa, Hymenobacter psychrophilus
MREDLTIVPASTVPPTVSTQLARASAKVASFLEVGLQGAANTERAYTSDLKSYVGFCERHGLRALPADVETLTEYVAYLATEKPTPEPSDGGRGEKKKRKGQQPLTRPHSLATIKRHLAAIRKAHQLAGHRLPVTLDALNVVMEGIARTLGKRQDQAQAFTAEELKQAIRRIDLETSAGLRDRALLLLGFAGAFRRSELVELNIEQLEFTERALLVHLAKSKTNQYGAVEDKAIFYAPTMDFCPVRCLRAWLNLLGRNTGPLFVKIPRATPGQMAAPSDKRLSDISINKLVQKRLGPAYSAHSLRVSFVTVAVLNGQSHKAIKNQTKQKTDAMIERYTQLNNVVSYNAAQSLGL

SEQ ID NO: 1803 - protein, 354 aa, Hymenobacter aerophilus
MREDLSIVPASTVPPTVSTQLARASAKVAGFLEVGLQGAANTERAYTSDLKSYVGFCERHGLRALPADVETLTEYVAYLATEKPIPEPGTGGRGEKKKRKGQQPLTRPHSLATIKRHLAAIRKAHQLAGHRLPATLDALNVVMEGIARTLGKRQDQAQAFTVEELKQAIRRIDLETSAGLRDRALLLLGFAGAFRRSELVELNIEQLEFTERALLVHLTKSKTNQYGAVEDKAIFYAPTMDFCPVRCLRAWLNLLGRTTGPLFVKIPRAAAGQMAAASEKRLSDISINKLVQKRLGLGYSAHSLRVSFVTVAVLNGQSHKAIKNQTKQKTDAMIERYTQLNNVVSYNAAQALGL

SEQ ID NO: 1804 - protein, 352 aa, Hymenobacter mucosus
MSEDLSLVASSPAGQSVGAQLARASAKVAGFLEVGLQGAANTERAYTSDLKSYVTFCEQHGFVAVPADVDTLTEYVAYLASEKPVSDTMGGGGKKKRKGQQPLTRPHSLATIKRHLAAIRKAHQLAGHRLPATLDALNIVMEGIARTLGKRQDQAPAFTVEELKQAIRRMDLETSAGLRDRALLLLGFAGAFRRSELVDLNIEQLDFTERALLVHLAKSKTNQYGAVEDKAIFYAPNADYCPVRCLRAWLHLLGRTTGALFVKIPRAAPGQMAVPSDKRLSDISINKLVQKRLGPDYSAHSLRVSFVTVAVLNGQSHKAIKNQTKQKTDAMIERYTQLNNVVSYNAAQALGL

SEQ ID NO: 1805 - protein, 349 aa, Hymenobacter sp. MIMBbqt21
MNEDLSLIPAANANQSISAQLARASAKVAGFLEAGLQGAANTERAYTADLKSYVAFCEQHGLQAVPADVDTLTEYVAYLASEKPEPAPGEGTRKKGQQPLTGPHALATIKRHLAAIRKAHQLAGYRLPATLDALNLVMEGITRTLGKRQEQAQAFTVEELKQAIRRIDLDTSAGIRDRALLLLGFAGAFRRSELVELNIEQLEFTERALLVHLAKSKTNQYGAIEDKAIFYAPTMDYCPVRCLRAWLYLLGRTTGPLFVKIPRTIPGQLAVPSTKRLSDISINKLVQKRLGPAYSAHSLRVSFVTTAVLNGQSHKAIKNQTKQKTDAMIEHYTQLHNVVSYNAAQALGL

SEQ ID NO: 1806 - protein, 347 aa, Xenorhabdus mauleonii
MAGGLSLIDQEVVFIPDNPELNEDVLRNLHAFMKDKEAFADNTWQQLMKASRLWCQWCIGKGRPYLPVDADYLRDYLWELHENGLAPATISNYAAMLNLLHRQAGLIPAGDSQKVKRILKKIHRVAIVHGEKAGQAIPFRIADLNQVDTAWQDSASLKERRNLAFLFVAYNTLLRISNLARLKVGDVTFNPDGSVMLHIGYTKTQVDGQGSIKALSPRASASLRHWLQVSGLIEHPDAYIFCRVHRSNQAIVATEKPMDEFNLSQVFSAAWSVVHGDKKAARNKGRYATWTGHSARVGAAQDMTESGYSLAQIMHEGAWKKPETVLGYIRNIEAKKSVMIELVEGKS

SEQ ID NO: 1807 - protein, 297 aa, Bacillus sp.
MEDRLQDFIHFMVVEKGLSKNTILSYERDLKNYLLYIQKVEQITSLNDITRVHIVHFLHHLKKQGKSAKTLARHVASVRSFHQFLLREKATEHDPSVHIESPQIEKTLPKVLNLSEVEALLESPDEDSPLGIRDRAMLELLYATGIRVSELIQLNLDDLHLTMGFIRCIGKGNKERIIPIGKTASNVIEKYISIGRPKLKSKQNSTEALFLNHHGNRLTRQGFWKILKGLAKKANIEKDLTPHTLRHSFATHLLENGADLRAVQEMLGHADISTTQIYTHVTKIRLKDVYSKHHPRA

SEQ ID NO: 1808 - protein, 411 aa, Pseudomonas sp. TTU2014-080ASC
MSSTTQAKASLEAELAKHPGIEIHGNSIRVVFMWRRRRYRETLGLPLTKANIKHAALLRAAVLHDIKIGTFDYGRHFPNSRNATNFSNTKDERLHALLERYKPLKAVDITTETQSRYFAALDICVDLLGGNRLGSILLPEDIQKLRVELIAGRATSTTNHYLATLAGFLNWCESNGYCRKGLAEACTRFTMTDRDPDPLTKSEFEALLDKGCLHPMDHAAITLAVYTGLRPGELCALAREDVDMANGLIHVNRSITSSGTFKLPKTGKKRTVMLFPPALEACRVLLGIKHGIAPQKLAIELNRHESVQETVTPLLTPLVQARRKQINTWFVPTAWNTKWHNIQRRAKIRPRRPYQTRHTYACWCLVARGNLAFIAKQMGHKDFTMLVQVYAKWMDDESPNELSSIWAGMSR

SEQ ID NO: 1809 - protein, 217 aa, Leptospira interrogans
MSISSNVILISDHRKKKYKKSLNNDSGSMFGKGLTDEMMSYLTKEFANPVSERAYRNRAIFLILSQTALRAKETVNLRFSDLLKAPTNETLARYVKKGGRIAYSVISESCLKSVQEYHSKFNLKSDYFFLSLPRRNQNWRSNLSTRGLQLIVNSWNVRTCSGRISRPHCFRHTAGTKLLETSGSIAAQLTLGHSSPIITSKYYTKRYYNASMFLTWE

SEQ ID NO: 1810 - protein, 391 aa, Sinorhizobium meliloti
MIDNQRAARSDSQAVHRRAEELDALDAILPFDRRDQLSALLTDDDVATLKHLAQEGMGENTLRALSSDLGYLEAWCRLATGDPLPWPAPEALLLKFVAHHLWDPVKRAEDPAHGMPADVEAGLRAERLLRSPGPHAPGTVRRRLTSWSILTRWRGLAGAFGAPSLKSALRLAVRASARPRQRKSKKAVTVDILVQLLQACAGDRLVDVRDRALLLAAFASGGRRRSEVAALRVEDLADEELVRADPSDKTSPPLPCLSIRLGRTKTTTADENEHVLLIGRPVAALKTWLAEAQIKDGPVFRCIDRWGNIDRRALTPQSVNLILKARCEQAGLDPALFSAHGLRSGYLTEAANRGIPLPEAMQQSLHKSVTQAASYYNNAERKNGRAARLIV

SEQ ID NO: 1811 - protein, 322 aa, Paraglaciecola sp. MB-3u-78
MTDLMSVSDISDETVRSQVLANLEEFKHDLLDDMASNTKRAYLSDFEHYLSFCLKHGLVSMSDDWRVTKDTIKTYFVSLMASDLKNASIKRKLSSIKFFIGIAELPDPFKHSKLLRDFITNKLKKKPAAQTQANPVTAEVLVALNETFNPLSLLDIRNKLLVNLAFDSLFRASNLAEIEVAHIDREHGSVFASYSKTDQEGQGSYGYISPKTIILLDEWLNASGITERFIFRTLSPKQTVQQKTMGYQAIYKTFKNFGGSRYLDNKISYSCHSTRVGATVSMTEQNRPLIKIIQAGNWKSERMAIRYGQRTNVAKGGMVDII

SEQ ID NO: 1812 - protein, 319 aa, Hymenobacter sp. PAMC 26554
METDTALLANPVGHGLAHHTGAAARYVEAGLNGAPNTTRAYTAHLKRFGGWCAAHGHQPLPASVDALVGFCTHLAEAGKKVGTLQQHCAAISKAHAVRGVDSPTDDKQFKIFMDGVRRVHGVRQKQAPAFSLAQFKQLVRGLDTTTVAGLRDRAILLLGFTGAFRRSELTALNVQDLRFTEDCLVVSLGRSKTNQLGDYEEKAIFYSPESAVCPIRSLKAWLAQLERSEGPVFVMLRKGNRLTTNRLSDQTINTLVQRYLGAGYTAHSLRASFVTVAKLNGADDSKIMNQTKHKTSAMIRRYTRLDNVQQHNAAKELGL

SEQ ID NO: 1813 - protein, 341 aa, Acinetobacter tjernbergiae
MKIPKPRKRGDSFRIELMYEGRRISATRDTEKECEQWAALKLLEFKTGKAQEEKGIKPSFPFKKLCEKYFLEKGSKLKSSHVIRNKLDNLERITGELANKSIYDFKPNDIVRWRNRRVLEVKSSTALREFAMFSAIFTYAQKELFLIENNVWNTVVKPDKGKGRSQRISPEDQEKIFKRSKWDNETAPFYSQHYVGWSLLFALETAMRQGEILAMKRKDVRDGFIHLPITKNGESRDVPLSKEAKRLLSLLPVENDILVPVKVKTFKRTWIRMRDEAGLSHINFHDTRHEAITRMVRNRKLPVEVLAKITGHKTINILINTYYNPNYECKFFPRVSHDIHQ

SEQ ID NO: 1814 - protein, 352 aa, Methylocystis rosea
MTKIDDDLESGGAPLAERPSAPHLAALSEKARDYARNARSDNTRRAYDADWRQFAAWLRRQGLDPLPPEPQTVGLYLTACMEGVLGREPVSVATLERRLAGICWHYRQCGAPLDTSDRHIATVLAGIRRAHSRPPLQKEAIFADELLAMLSVLEMDLRGIRDRAILAIGFSGGLRRSEIVGLDCGPDQTEDGAGWVEIFPPAGPGNEGGAVLQISGKTGWREVEIGRGSRPETCPVALLETWMRLGRISHGPLFRPIARKNGGVSSERLTDKHVARLVQKTALAAGIRGDLTEGERRLAFGGHSLRAGLASSAQIEEAHVQKHLGHASAEMTRRYQRKRDRFRVNLTKAAGL

SEQ ID NO: 1815 - protein, 401 aa, Pectobacterium sp.
MGYKIKKFIMSSGERGHLILDKETELPVYYQNLFLTENVRNRNATASTVEVVATNLLIFSNFLDSRKINIVERIEAKKYLSIAEINDLIRYAKQRFDKQKITNIRQMNKMFIAKRTFSYRIHVFSSYLKWLCILVHSTKGIHDRYEVDNFIESIKAYIPRKSSLNMNDRSDKSLDEGEIRILFNLLKVDGNNNPFQKDVQIRNRLIFSLLFNLGLRAGELLNLKIDDFDLRDNTLSIIRRHDSKEDRRSYQPLVKTGERVIPLSDELASDIFRYISDSREKMTKRKKHNFLLVAHYTGKTAGEPLSISAYEKIISTLKRASPELSKLSGHRLRHSWNYIYSKEMDVSNLEFGRKKELRNYCQGWSKGSKMSENYNFKYISQQEKEVILRIYGSINKIISGA

SEQ ID NO: 1816 - protein, 447 aa, Alcanivorax pacificus
MTTPLSVRAIESMRPGDSPRTDVGETQGLRVTCAKSGVRTFIYRYRSPETGKLVQLKLGHYPGLKLAEARMQVVRMKELQRAGVCPKAQQERELAAQREEEEKARREQEAAAFLVADLIELYLTEVIEDRMIKDARTGKPKRVAGSRKPKGQAEVRRTLYNDPVRVLGDMPAGEVTRKHVVDLVRKILARGANVQAGNVLRELTAAYEYAIAMEKLPEDFANPAMLAKGSLRTARVKLSSEKGRRALSDEDLRALLAWLPGSGFSVTQKNVIRLTLWTGCRTGEVCEAEWRDVDLEKGVWHMRDSKNGAERYVQLSRQAVEFLRQLKLNGTTYVFPSSRSGRPIQQKSLSEAKWQLKHPEQVQNRRVYRPEQRWLTTIEDWSPHDLRRTVRTGLSRLGCPSEVAEAVLGHSRKGIEGTYDLHRYEDQCKVWLQKWADHLDTLLRQKG

SEQ ID NO: 1817 - protein, 223 aa, Solobacterium moorei
MRQLRRLQRTKGYLRKTDDKHGREIVKPFIKSDFDEMVRCCLNHRDKHNPSSWKYRVWYRNYILLILGVNTGNRIETLIELTPRDIAGGQYTCKEMKTGKVQQFNMNADVYATVREYIERYNIQMNEYIFESRQGFKGYPITRQQAWRIIKQLADEAGIKYPVACHSLRKSYGRWYWDSTHDLLTTQKLLMHESAAETMLYIMLEPSDIQEVRESINHTEKWG

SEQ ID NO: 1818 - protein, 348 aa, Ponticoccus sp. LZ-14
MPNLVTPRETNLDDEALEALSDLFVRGTPANTIRAYERDLAYITAWKMAAFGTDLAWPEEEAVAMRFVLDHSRDLQDISGDAARVAQSLISQGLRRSLECPAPSTLDRRIASWRSFHRMRNLPSPFDAPLIRQARSKARRAAGRPAAPKSANPITREIVDEMCAAAGPGLRGIRDRAILLLGWASGGRRRSEIATLRREDVDLGDFDSDGIVWLRLRDTKTTRQEQTPKLVLKGRAARAVTAWIDAAEIRDGALFRKIGTTGRPGTRALSPAGIGQIVKRCLEQSGRGADFASAHGLRSGFLTQAALDGAPLQAAMRLSLHKSAAQAQAYYGDVEITDNPATDLLDKS

SEQ ID NO: 1819 - protein, 369 aa, Enterococcus hermanniensis
MNQQEANRRMEEEIQFFPWFIQNYFRKKSGDQYSSITLYEYAKEYRRFLNWLIQESFSSADKISEVTLTEFANLWPEDLEFYKAHLVKAPKILKETTQKRLEENDQSLPLRQNATVQRGITALRSLFNYLNDAVDRNSGKPYLEHNMMAKVANVKDNKTMAERGAAIEKKLFLDEEAIDFLDYIEHRYIDTLETRQAITAFKKNQVRDLAIIALFLGTGMRLSELVNMNVQDLDLTSGEARVYRKGGKWDMVVISSIAMEFLTNYLAQRENLYQPAETETALFLTRYRGKAKRIASGAVEAMVGKYSESFKIKISPHKLRHSVATQLYSKTNSLIQVAEQLGQSGTSATTVYTHIAGKQKRDAMNDLWT

SEQ ID NO: 1820 - protein, 362 aa, Agrobacterium sp. LAD9
MQNPPANTPKIDDSADSALPAGVELVVEMDAASRPARLEALVETATAYANAASSENTRDAYAKDWRHFTTWCRREGFEPMPPSSQVIGLYIGACASGDPKRNTPALSVATIERRLSGLAWNFTQRGIPMDRSNRHIATVLAGIRRKHAKPPRQKEAVLGEDIKAMVDTLGHHLRGLRDRAILLLGFAGGLRRSEIVGLDIVRDDHSDGHGWIEIFPSQGVLVTLRGKTGWRQVEVGRGASEQTCPVVALESWIRFGRIVRGPLFRRIFKDNKTVDVERLSDKHVARLVKQTALAAGVRSDLPEGERALLFAGHSLRAGLASSAEIEERYVQKQLGHASAEMTRKYQRRRDRFRTNLTKASGL

SEQ ID NO: 1821 - protein, 385 aa, Lactococcus lactis
MTITKNKNGTWRVDISDGINPLTGIQGRHRKYDCKTKKEAIEYEAKYRLEELGEFKRKDKLSIDSLYALLKKEDVLRGNRQSTKDTQDSYYRIYVSKFFQNADMRLVKTSDIKAFRDWLIKTPSVKGGNLSASNINTIMIFVGKLFDISMMNDLRKDNPCKALKRLPQQHKEMFYYTPEQFKQFISLFDESEYHFQLLYKILMFTGARIGEALALTWEQINLEIGYIDIKSSAHYRKSKVTIAETKTTQSIRRIYIHKALIDELSKWKQRQFQLLIKYISTPEQLQIYQNTPKVLTAPDVSNFKKEKLKKRAELINLKLIRNHDFRHSHAAFLISQGLRKGEGKDYLFFTLMKRLGHSSITTTINTYSHLFPTQQKEIANAFDDF

SEQ ID NO: 1822 - protein, 30 aa, Unknown
  source: /note="Description of Unknown: NLS polypeptide"
MDSLLMNRRKFLYQFKNVRWAKGRRETYLC

SEQ ID NO: 1823 - protein, 28 aa, Unknown
  source: /note="Description of Unknown: NLS polypeptide"
PKKRKVEGADKRTADGSEFESPKKKRKV

SEQ ID NO: 1824 - protein, 40 aa, Unknown
  source: /note="Description of Unknown: NLS polypeptide"
RKSGKIAAIWKRPRKPKKKRKVKRTADGSEFESPKKKRKV

SEQ ID NO: 1825 - protein, 17 aa, Unknown
  source: /note="Description of Unknown: NLS polypeptide"
KKTELQTTNAENKTKKL

SEQ ID NO: 1826 - protein, 19 aa, Unknown
  source: /note="Description of Unknown: NLS polypeptide"
KRGINDRNFWRGENGRKTR

SEQ ID NO: 1827 - protein, 16 aa, Unknown
  source: /note="Description of Unknown: NLS polypeptide"
KRPAATKKAGQAKKKK

SEQ ID NO: 1828 - protein, 16 aa, Unknown
  source: /note="Description of Unknown: NLS polypeptide"
KRPAATKKAGQAKKKK

SEQ ID NO: 1829 - protein, 29 aa, Unknown
  source: /note="Description of Unknown: NLS polypeptide"
PKKKRKVEGADKRTADGSEFESPKKKRKV

SEQ ID NO: 1830 - protein, 16 aa, Artificial Sequence
  source: /note="Description of Artificial Sequence: Synthetic peptide"
SGSETPGTSESATPES

SEQ ID NO: 1831 - protein, 4 aa, Artificial Sequence
  source: /note="Description of Artificial Sequence: Synthetic peptide"
SGGS

SEQ ID NO: 1832 - protein, 4 aa, Artificial Sequence
  source: /note="Description of Artificial Sequence: Synthetic peptide"
GGGS

SEQ ID NO: 1833 - protein, 5 aa, Artificial Sequence
  source: /note="Description of Artificial Sequence: Synthetic peptide"
GGGGS

SEQ ID NO: 1834 - protein, 5 aa, Artificial Sequence
  source: /note="Description of Artificial Sequence: Synthetic peptide"
EAAAK

SEQ ID NO: 1835 - DNA, 76 bp, Artificial Sequence
  source: /note="Description of Artificial Sequence: Synthetic oligonucleotide"
gttttagagctagaaatagcaagttaaaataaggctagtccgttatcaacttgaaaaagtgggaccgagtcggtcc

SEQ ID NO: 1836 - DNA, 306 bp, Artificial Sequence
  source: /note="Description of Artificial Sequence: Synthetic polynucleotide"
tgcctgtcatacgaaaccgagatactgacagtagaatatggccttctgccaatcgggaagattgtggagaaacggatagaatgcacagtttactctgtcgataacaatggtaacatttatactcagccagttgcccagtggcacgaccggggagagcaggaagtattcgaatactgtctggaggatggaagtctcattagggccactaaggaccacaaatttatgacagtcgatggccagatgctgcctatagacgaaatctttgagcgagagttggacctcatgcgagttgacaaccttcctaat

SEQ ID NO: 1837 - protein, 102 aa, Artificial Sequence
  source: /note="Description of Artificial Sequence: Synthetic polypeptide"
CLSYETEILTVEYGLLPIGKIVEKRIECTVYSVDNNGNIYTQPVAQWHDRGEQEVFEYCLEDGSLIRATKDHKFMTVDGQMLPIDEIFERELDLMRVDNLPN

SEQ ID NO: 1838 - DNA, 108 bp, Artificial Sequence
  source: /note="Description of Artificial Sequence: Synthetic polynucleotide"
atgatcaagatagctacaaggaagtatcttggcaaacaaaacgtttatgatattggagtcgaaagagatcacaactttgctctgaagaacggattcatagcttctaat

SEQ ID NO: 1839 - protein, 36 aa, Artificial Sequence
  source: /note="Description of Artificial Sequence: Synthetic polypeptide"
MIKIATRKYLGKQNVYDIGVERDHNFALKNGFIASN

SEQ ID NO: 1840 - DNA, 303 bp, Artificial Sequence
  source: /note="Description of Artificial Sequence: Synthetic polynucleotide"
tgcctgtcttatgataccgagatacttaccgttgaatatggcttcttgcctattggaaagattgtcgaagagagaattgaatgcacagtatatactgtagacaagaatggtttcgtttacacacagcccattgctcaatggcacaatcgcggcgaacaagaagtatttgagtactgtctcgaggatggaagcatcatacgagcaactaaagatcataaattcatgaccactgacgggcagatgttgccaatagatgagatattcgagcggggcttggatctcaaacaagtggatggattgcca

SEQ ID NO: 1841 - protein, 101 aa, Artificial Sequence
  source: /note="Description of Artificial Sequence: Synthetic polypeptide"
CLSYDTEILTVEYGFLPIGKIVEERIECTVYTVDKNGFVYTQPIAQWHNRGEQEVFEYCLEDGSIIRATKDHKFMTTDGQMLPIDEIFERGLDLKQVDGLP

SEQ ID NO: 1842 - DNA, 159 bp, Artificial Sequence
  source: /note="Description of Artificial Sequence: Synthetic polynucleotide"
atgaagaggactgccgatggatcagagtttgaatctcccaagaagaagaggaaagtaaagataatatctcgaaaaagtcttggtacccaaaatgtctatgatattggagtggagaaagatcacaacttccttctcaagaacggtctcgtagccagcaac

SEQ ID NO: 1843 - protein, 53 aa, Artificial Sequence
  source: /note="Description of Artificial Sequence: Synthetic polypeptide"
MKRTADGSEFESPKKKRKVKIISRKSLGTQNVYDIGVEKDHNFLLKNGLVASN

SEQ ID NO: 1844 - protein, 4 aa, Artificial Sequence
  source: /note="Description of Artificial Sequence: Synthetic peptide"
GGGS

SEQ ID NO: 1845 - DNA, 250 bp, Homo sapiens
ccggtcccccccgccgggtccgcccccggggccgcggttccgcgcggcgcctcgcctcggccggcgcctagcagccgacttagaactggtgcggaccaggggaatccgactgtttaattaaaacaaagcatcgcgaaggcccgcggcgggtgttgacgcgatgtgatttctgcccagtgctctgaatgtcaaagtgaagaaattcaatgaagcgcgggtaaacggcgggagtaactatgactctcttaag

SEQ ID NO: 1846 - DNA, 250 bp, Homo sapiens
gcggttccgcgcggcgcctcgcctcggccggcgcctagcagccgacttagaactggtgcggaccaggggaatccgactgtttaattaaaacaaagcatcgcgaaggcccgcggcgggtgttgacgcgatgtgatttctgcccagtgctctgaatgtcaaagtgaagaaattcaatgaagcgcgggtaaacggcgggagtaactatgactctcttaaggtagccaaatgcctcgtcatctaattagtgacg

SEQ ID NO: 1847 - DNA, 250 bp, Homo sapiens
tcccccccgccgggtccgcccccggggccgcggttccgcgcggcgcctcgcctcggccggcgcctagcagccgacttagaactggtgcggaccaggggaatccgactgtttaattaaaacaaagcatcgcgaaggcccgcggcgggtgttgacgcgatgtgatttctgcccagtgctctgaatgtcaaagtgaagaaattcaatgaagcgcgggtaaacggcgggagtaactatgactctcttaaggtag

SEQ ID NO: 1848 - DNA, 250 bp, Homo sapiens
cggcgcgctcgccggccgaggtgggatcccgaggcctctccagtccgccgagggcgcaccaccggcccgtctcgcccgccgcgccggggaggtggagcacgagcgcacgtgttaggacccgaaagatggtgaactatgcctgggcagggcgaagccagaggaaactctggtggaggtccgtagcggtcctgacgtgcaaatcggtcgtccgacctgggtataggggcgaaagactaatcgaaccatctag

SEQ ID NO: 1849 - DNA, 250 bp, Homo sapiens
gcattcgtattgcgccgctagaggtgaaattcttggaccggcgcaagacggaccagagcgaaagcatttgccaagaatgttttcattaatcaagaacgaaagtcggaggttcgaagacgatcagataccgtcgtagttccgaccataaacgatgccgaccggcgatgcggcggcgttattcccatgacccgccgggcagcttccgggaaaccaaagtctttgggttccggggggagtatggttgcaaagc

SEQ ID NO: 1850 - DNA, 250 bp, Homo sapiens
tagcagccgacttagaactggtgcggaccaggggaatccgactgtttaattaaaacaaagcatcgcgaaggcccgcggcgggtgttgacgcgatgtgatttctgcccagtgctctgaatgtcaaagtgaagaaattcaatgaagcgcgggtaaacggcgggagtaactatgactctcttaaggtagccaaatgcctcgtcatctaattagtgacgcgcatgaatggatgaacgagattcccactgtccct

SEQ ID NO: 1851 - DNA, 250 bp, Homo sapiens
ccccccgccgggtccgcccccggggccgcggttccgcgcggcgcctcgcctcggccggcgcctagcagccgacttagaactggtgcggaccaggggaatccgactgtttaattaaaacaaagcatcgcgaaggcccgcggcgggtgttgacgcgatgtgatttctgcccagtgctctgaatgtcaaagtgaagaaattcaatgaagcgcgggtaaacggcgggagtaactatgactctcttaaggtagcc

SEQ ID NO: 1852 - DNA, 250 bp, Homo sapiens
gcgcaagacggaccagagcgaaagcatttgccaagaatgttttcattaatcaagaacgaaagtcggaggttcgaagacgatcagataccgtcgtagttccgaccataaacgatgccgaccggcgatgcggcggcgttattcccatgacccgccgggcagcttccgggaaaccaaagtctttgggttccggggggagtatggttgcaaagctgaaacttaaaggaattgacggaagggcaccaccaggagt

SEQ ID NO: 1853 - DNA, 250 bp, Homo sapiens
ggccgggcgcgacccgctccggggacagtgccaggtggggagtttgactggggcggtacacctgtcaaacggtaacgcaggtgtcctaaggcgagctcagggaggacagaaacctcccgtggagcagaagggcaaaagctcgcttgatcttgattttcagtacgaatacagaccgtgaaagcggggcctcacgatccttctgaccttttgggttttaagcaggaggtgtcagaaaagttaccacagggat

SEQ ID NO: 1854 - DNA, 19 bp, Homo sapiens
gtctacggccataccaccc

SEQ ID NO: 1855 - DNA, 38 bp, Homo sapiens
atcgcttctcggccttttggctaagatcaagtgtagta

SEQ ID NO: 1856 - DNA, 250 bp, Homo sapiens
gtagccaaatgcctcgtcatctaattagtgacgcgcatgaatggatgaacgagattcccactgtccctacctactatccagcgaaaccacagccaagggaacgggcttggcggaatcagcggggaaagaagaccctgttgagcttgactctagtctggcacggtgaagagacatgagaggtgtagaataagtgggaggcccccggcgcccccccggtgtccccgcgaggggcccggggcggggtccgccg

SEQ ID NO: 1857 - DNA, 250 bp, Homo sapiens
cgcatgaatggatgaacgagattcccactgtccctacctactatccagcgaaaccacagccaagggaacgggcttggcggaatcagcggggaaagaagaccctgttgagcttgactctagtctggcacggtgaagagacatgagaggtgtagaataagtgggaggcccccggcgcccccccggtgtccccgcgaggggcccggggcggggtccgccggccctgcgggccgccggtgaaataccactactc

SEQ ID NO: 1858 - DNA, 250 bp, Homo sapiens
ccaaatgcctcgtcatctaattagtgacgcgcatgaatggatgaacgagattcccactgtccctacctactatccagcgaaaccacagccaagggaacgggcttggcggaatcagcggggaaagaagaccctgttgagcttgactctagtctggcacggtgaagagacatgagaggtgtagaataagtgggaggcccccggcgcccccccggtgtccccgcgaggggcccggggcggggtccgccggccc

SEQ ID NO: 1859 - DNA, 250 bp, Homo sapiens
tagctggttccctccgaagtttccctcaggatagctggcgctctcgcagacccgacgcacccccgccacgcagttttatccggtaaagcgaatgattagaggtcttggggccgaaacgatctcaacctattctcaaactttaaatgggtaagaagcccggctcgctggcgtggagccgggcgtggaatgcgagtgcctagtgggccacttttggtaagcagaactggcgctgcgggatgaaccgaacgcc

SEQ ID NO: 1860 - DNA, 250 bp, Homo sapiens
tgaaacttaaaggaattgacggaagggcaccaccaggagtggagcctgcggcttaatttgactcaacacgggaaacctcacccggcccggacacggacaggattgacagattgatagctctttctcgattccgtgggtggtggtgcatggccgttcttagttggtggagcgatttgtctggttaattccgataacgaacgagactctggcatgctaactagttacgcgacccccgagcggtcggcgtccc

SEQ ID NO: 1861 - DNA, 250 bp, Homo sapiens
acctactatccagcgaaaccacagccaagggaacgggcttggcggaatcagcggggaaagaagaccctgttgagcttgactctagtctggcacggtgaagagacatgagaggtgtagaataagtgggaggcccccggcgcccccccggtgtccccgcgaggggcccggggcggggtccgccggccctgcgggccgccggtgaaataccactactctgatcgttttttcactgacccggtgaggcgggggg

SEQ ID NO: 1862 - DNA, 250 bp, Homo sapiens
aaatgcctcgtcatctaattagtgacgcgcatgaatggatgaacgagattcccactgtccctacctactatccagcgaaaccacagccaagggaacgggcttggcggaatcagcggggaaagaagaccctgttgagcttgactctagtctggcacggtgaagagacatgagaggtgtagaataagtgggaggcccccggcgcccccccggtgtccccgcgaggggcccggggcggggtccgccggccctg

SEQ ID NO: 1863 - DNA, 250 bp, Homo sapiens
ggagcctgcggcttaatttgactcaacacgggaaacctcacccggcccggacacggacaggattgacagattgatagctctttctcgattccgtgggtggtggtgcatggccgttcttagttggtggagcgatttgtctggttaattccgataacgaacgagactctggcatgctaactagttacgcgacccccgagcggtcggcgtcccccaacttcttagagggacaagtggcgttcagccacccgag

SEQ ID NO: 1864 - DNA, 250 bp, Homo sapiens
aactggcttgtggcggccaagcgttcatagcgacgtcgctttttgatccttcgatgtcggctcttcctatcattgtgaagcagaattcaccaagcgttggattgttcacccactaatagggaacgtgagctgggtttagaccgtcgtgagacaggttagttttaccctactgatgatgtgttgttgccatggtaatcctgctcagtacgagaggaaccgcaggttcagacatttggtgtatgtgcttggc

SEQ ID NO: 1865 - DNA, 102 bp, Homo sapiens
tgaacgcgcccgatctcgtctgatctcggaagctaagcagggtcgggcctggttagtacttggatgggagaccgcctgggaataccgggtgctgtaggcttt

SEQ ID NO: 1866 - DNA, 150 bp, Homo sapiens
tctgttcttatcagtttaatatctgatacgtcctctatccgaggacaatatattaaatggatttttggagcagggagatggaataggagcttgctccgtccactccacgcatcgacctggtattgcagtacctccaggaacggtgcaccc

SEQ ID NO: 1867 - RNA, 47 nt, Artificial Sequence
  source: /note="Description of Artificial Sequence: Synthetic oligonucleotide"
gggaaauaagagagaaaagaagaguaagaagaaauauaagagccacc

SEQ ID NO: 1868 - RNA, 110 nt, Artificial Sequence
  source: /note="Description of Artificial Sequence: Synthetic polynucleotide"
ugauaauaggcuggagccucgguggccaugcuucuugccccuugggccuccccccagccccuccuccccuuccugcacccguacccccguggucuuugaauaaagucuga

SEQ ID NO: 1869 - RNA, 47 nt, Artificial Sequence; identical to SEQ ID NO: 1867
  source: /note="Description of Artificial Sequence: Synthetic oligonucleotide"

SEQ ID NO: 1870 - RNA, 110 nt, Artificial Sequence; identical to SEQ ID NO: 1868
  source: /note="Description of Artificial Sequence: Synthetic polynucleotide"

SEQ ID NO: 1871 - RNA, 47 nt, Artificial Sequence; identical to SEQ ID NO: 1867
  source: /note="Description of Artificial Sequence: Synthetic oligonucleotide"

SEQ ID NO: 1872 - RNA, 110 nt, Artificial Sequence; identical to SEQ ID NO: 1868
  source: /note="Description of Artificial Sequence: Synthetic polynucleotide"

SEQ ID NO: 1873 - protein, 9 aa, Artificial Sequence
  source: /note="Description of Artificial Sequence: Synthetic peptide"
RRRRRRRRR

1. (canceled)

2. A system for modifying DNA comprising:
a) a recombinase polypeptide comprising an amino acid sequence selected from SEQ ID NO: 1241, SEQ ID NO: 1249, or comprising an amino acid sequence of Table 1 or 2, or an amino acid sequence having at least 70% identity thereto, or a nucleic acid encoding the recombinase polypeptide; and
b) an insert DNA comprising:
(i) a human first parapalindromic sequence and a human second parapalindromic sequence of Table 1 that bind to the recombinase polypeptide of (a).

3. A eukaryotic cell comprising the recombinase polypeptide of claim 7, or a nucleic acid encoding the recombinase polypeptide.

4. A eukaryotic cell comprising:
(i) a DNA recognition sequence, said DNA recognition sequence comprising a first parapalindromic sequence and a second parapalindromic sequence,
wherein each parapalindromic sequence is about 10-30, 12-27, or 10-15 nucleotides, and the first and second parapalindromic sequences together comprise the parapalindromic region of a nucleotide sequence of Table 1, or a nucleotide sequence having at least 70%, 75%, 80%, 85%, 90%, 95%, 96%, 97%, 98%, or 99% identity thereto, or having no more than 1, 2, 3, 4, 5, 6, 7, or 8 sequence alterations relative thereto,
wherein said DNA recognition sequence further comprises a core sequence of about 5-10 nucleotides, and wherein the core sequence is situated between the first and second parapalindromic sequences; and
(ii) a heterologous object sequence;
wherein:
(a) the DNA recognition sequence is located within 1, 2, 3, 4, 5, 6, 7, 8, 9, 10, 15, 20, 25, 30, 40, 50, 60, 70, 80, 90, or 100 nucleotides of the heterologous object sequence; and/or
(b) the DNA recognition sequence and the heterologous objet sequence are extrachromosomal.

5. A method of modifying the genome of a eukaryotic cell comprising contacting the cell with:
a) a recombinase polypeptide comprising an amino acid sequence selected from SEQ ID NO: 1241, SEQ ID NO: 1249, or comprising an amino acid sequence of Table 1 or 2, or a sequence having at least 70%, 75%, 80%, 85%, 90%, 95%, 96%, 97%, 98%, or 99% identity thereto, or a nucleic acid encoding the recombinase polypeptide; and
b) an insert DNA comprising:
(i) a DNA recognition sequence that binds to the recombinase polypeptide of (a), said DNA recognition sequence comprising a first parapalindromic sequence and a second parapalindromic sequence, wherein each parapalindromic sequence is about 10-30, 12-27, or 10-15 nucleotides, and the first and second parapalindromic sequences together comprise the parapalindromic region of a nucleotide sequence of Table 1, or a nucleotide sequence having at least 70%, 75%, 80%, 85%, 90%, 95%, 96%, 97%, 98%, or 99% identity thereto, or having no more than 1, 2, 3, or 4 sequence alterations relative thereto,
wherein said DNA recognition sequence further comprises a core sequence of about 5-10 nucleotides, and wherein the core sequence is situated between the first and second parapalindromic sequences, and
(ii) a heterologous object sequence,
thereby modifying the genome of the eukaryotic cell.

6. A method of inserting a heterologous object sequence into the genome of a eukaryotic cell comprising contacting the cell with:
a) a recombinase polypeptide comprising an amino acid sequence selected from Rec27 SEQ ID NO: 1241, SEQ ID NO: 1249, or comprising an amino acid sequence of Table 1 or 2, or a sequence having at least 70%, 75%, 80%, 85%, 90%, 95%, 96%, 97%, 98%, or 99% identity thereto, or a nucleic acid encoding the polypeptide; and
b) an insert DNA comprising:
(i) a DNA recognition sequence that binds to the recombinase polypeptide of (a), said DNA recognition sequence comprising a first parapalindromic sequence and a second parapalindromic sequence, wherein each parapalindromic sequence is about 10-30, 12-27, or 10-15 nucleotides, and the first and second parapalindromic sequences together comprise the parapalindromic region of a nucleotide sequence of Table 1, and
wherein said DNA recognition sequence further comprises a core sequence of about 5-10 nucleotides, and wherein the core sequence is situated between the first and second parapalindromic sequences, and
(ii) a heterologous object sequence,
thereby inserting the heterologous object sequence into the genome of the eukaryotic cell.

7. An isolated recombinase polypeptide comprising an amino acid sequence selected from SEQ ID NO: 1249, or comprising an amino acid sequence of Table 1 or 2 other than SEQ ID NO: 1241, or a sequence having at least 70%, 75%, 80%, 85%, 90%, 95%, 96%, 97%, 98%, or 99% identity thereto.

8. An isolated nucleic acid encoding the recombinase polypeptide of claim 7.

9. An isolated nucleic acid comprising:
(i) a DNA recognition sequence, said DNA recognition sequence comprising a first parapalindromic sequence and a second parapalindromic sequence, wherein each parapalindromic sequence is about 10-30, 12-27, or 10-15 nucleotides, and the first and second parapalindromic sequences together comprise the parapalindromic region of a nucleotide sequence of Table 1, and
said DNA recognition sequence further comprises a core sequence of about 5-10 nucleotides, wherein the core sequence is situated between the first and second parapalindromic sequences, and
(ii) a heterologous object sequence.

10. A method of making a recombinase polypeptide, the method comprising:
a) providing a nucleic acid encoding a recombinase polypeptide according to claim 7, and
b) introducing the nucleic acid into a eukaryotic cell under conditions that allow for production of the recombinase polypeptide,
thereby making the recombinase polypeptide.

11. A method of making an insert DNA that comprises a DNA recognition sequence and a heterologous sequence, comprising:
a) providing a nucleic acid comprising:
(i) a DNA recognition sequence that binds to a recombinase polypeptide according to claim 7, said DNA recognition sequence comprising a first parapalindromic sequence and a second parapalindromic sequence, wherein each parapalindromic sequence is about 10-30, 12-27, or 10-15 nucleotides, and the first and second parapalindromic sequences together comprise the parapalindromic region of a nucleotide sequence of Table 1, and
said DNA recognition sequence further comprises a core sequence of about 5-10 nucleotides, wherein the core sequence is situated between the first and second parapalindromic sequences, and
(ii) a heterologous object sequence, and
b) introducing the nucleic acid into a eukaryotic cell under conditions that allow for replication of the nucleic acid,
thereby making the insert DNA.

12. An isolated eukaryotic cell comprising a heterologous object sequence stably integrated into its genome at a genomic location listed in column 2 or 3 of Table 1.

13. The system of claim 2, wherein:
the insert DNA is a double-stranded DNA; and/or
the insert DNA comprises:
a DNA recognition sequence that binds to the recombinase polypeptide of (a),
said DNA recognition sequence comprising the first parapalindromic sequence and the second parapalindromic sequence, wherein each parapalindromic sequence is about 10-30, 12-27, or 10-15 nucleotides, and the first and second parapalindromic sequences together comprise the parapalindromic region of a nucleotide sequence of Table 1, or a nucleotide sequence having at least 70%, 75%, 80%, 85%, 90%, 95%, 96%, 97%, 98%, or 99% identity thereto, or having no more than 1, 2, 3, 4, 5, 6, 7, 8 sequence alterations relative thereto, and
said DNA recognition sequence further comprising a core sequence of about 5-10 nucleotides, wherein the core sequence is situated between the first and second parapalindromic sequences.

14. The system of claim 2, wherein the insert DNA comprises a heterologous object sequence.

15. The system of claim 2, wherein the recombinase polypeptide is selected from a recombinase listed in Table 16, or an amino acid sequence having at least 70%, 75%, 80%, 85%, 90%, 95%, 96%, 97%, 98%, or 99% identity thereto.

16. The system of claim 2, wherein the recombinase polypeptide of (a) and the insert DNA of (b) are in separate containers or admixed.

17. The system of claim 2, wherein the recombinase polypeptide comprises at least one insertion, deletion, or substitution relative to the amino acid sequence of Table 1 or 2.

18. The system of claim 2, wherein the recombinase polypeptide comprises a truncation at the N-terminus, C-terminus, or both of the N- and C-termini relative to the amino acid sequence of Table 1 or 2.

19. The system of claim 2, wherein the recombinase polypeptide comprises a nuclear localization sequence.

20. The system of claim 14, which results in an insert frequency of the heterologous object sequence into the genome of at least about 0.1%.
